United States Patent Application Publication US 2019/0144922 A1 - sequence listing, part 7

SEQ ID NO: 3 - DNA, 5315120 bp, Klebsiella pneumoniae (residues 1,771,708-3,543,414 of 5,315,120)
atttggaattttttcataatattgattttgtgagagaagaccgtcttatggctgatgcccagttcttgcgctatctgctgattgttcattcccgttctgatcgcatcgataatataaagttgtgatttggtcaaggttaaccgagggcatttgacacagcgtctgctgtctttttccagcccactgctactcgctgttgtcgactccgtcagacgttttgcaatctgattttttacgcggcgcaagtcgctgttcatgctgataaaagtggcatcgccaagacaaagtggtaactgttcaacctgcaaagcgctgtcggtggcgacgaaaataaaaatagacgtgtgcggaggaagttttttgaaaaacgggtggcatagataatgttcaccagcggccatttctgtgaacagcatatcaatcggacctaatatatctgtgaaatagtccacaacggaatacggttcacggatgtgttcttccttcgcgatctcgctaagcagttcgcaaattccgcgattaagaaatatgttttcagtgttaattaaaatatcaggcatagtcatggcgatcgtgaaagttgtcatgcatttaaagtggagaacattaaatgcgtatgcctttaggatatttctaataatcaacaaatgcaataagtctaattttggactttgagctggcgagtaaaattaatggtatattaatcaatggcttattttttagcgttgcgcgggcatgaccgctaatttggcacaaactgcttaaattgcttatattgcatgcgtaaattctggtctcaaatatattaatcagggttacttattcactgtatgaattgctttttcaaaaataccttttgcaggcgcgggtccttgaggagattgcgcctgagcgaaacctggggtggtcattgataaaaaggggcggggtagacccgccgctgcggagggtgaacagcaacggcgtacaacagaatcagttatcaggattgttggaaatgcttttccacaccattcccaggccgatcaacatcgacgcgaagagggcgaacagggtggttgagataaaaatgctggtcatggcggtgcctcagaaagtgcgtatgcagatcattaggcacggtgtcggatgaaaggttccttacccggccgggtatattttcaccagcggcgtccggttgacggcaacaaggcgaatgccacgtcgaagcgccgctgttggcaaggggatcctgacaggcagccgtgttgctaaacgcgctgttcatggggagaatacacgacggcaaagggggagcgattcggacgttgacatccccttaaacaagttatatatacatgtcgcttctgtttattgaatgttaaacagcatcagttatgggactcagaagcgccacagcccccgccgtcgggcgggggtaacttcgccaccggcatgcttatttttcactgaggctggcgaagaaaaattttttatttcgggtcttgaaaaacgcgccttagatattattttatatagcggacaagcaatgcttgcctttatgttgagcttttgaatgaatattcaggaggttaattatggcactcaaaaccttgtcagcactcccggtatttgctgattctctttttgccgatcgctttaatcgtattgaccgtcttttcagccagttaacgggcgatacgccggtgggcactttaccggcttatgatttacagaaagtcgacgacagcaatttcctgctctgcgtcagcgtgcctggctggaaagataatgagctggaaatagaaaccgtaggggggaatctgcatatttccgggaaacgccaggaaaccgatgcctcgacagacagcggtgaacgctggatttataaaggtatccgccgcgctaatttccagctcagtttctctcttcctgaacacgcccaaattaatcaggcgcagctggatagcggcatcttaaaaatagccatccaccaggagatcccggagagcgaaaaaccgcgtaaaattgcgatcgagaatcaggggcgcgtgatagaacataaagtttgattcaccgttgttccgaggatgttaccttaaaggcccgccctgcgggcctttatcctttcttcctgaaaataaaaatggccccccgacgacaaagaaatcgatatgctattctgttaacagacgcagtgagtctgctatttctttcaatttcggcgaggaggaagaatgactgacgagatcgatagcgacgcaaacaatacgcatgaactaaccgctgaagtggctcgggcgctgatcgcgcgcggttggcgactgaccacggcggagtcctgcaccggagggaatctggcggcagcgctctgtgcccaggcggataccgcggcattttatgataccggcgtagtgaccttcagcgatgaagccaagcgcaacgtgctgcaggttcgcgcggaaaccctggcggtacacagcgccgtcagcgaagcctgcgttcaggagatgtcctctggtattctggcgctcgccggggccgatatcgccatcgccgtcagcggctacgccggaccggagggcggggaagatggtacccccgccggcacggtatggtttgcctggaattttcgcggccagactgaaaccaaacggatgtgctttgccggcgactgtgagaccgtggtggcgaaagcggtacgatatgccctggcggcgctgagcgaaaagcttgcccactggcagtgacgatgcccgggggcgcggccttacaggtccattgcctggcgcgctaccggccagcagatctcgccgatgccgttaaggcagggtcgggaaaagagaaagccctgaaacaggcgaatgcccaccgactgcagccagcaccactcctccagggtttcgacaccttcagccaccaccgtaatgccaagatcctcgcagcagcggacgaccgaggcgacaatcgcctgtttggtgccgctaatatggatatcgcgtaccagttccgcatccactttgattttatcaggctgaaaacgggtcagtaacgacaggccggaataacctgcgccaaagtcgtcgatggccagcttcatgcccgcgacgcgcagggctttgagcaccttgcggaactggtcaaagcaggtgatcacctctgtctcggtgacctcgatcagtacctgatccggtctgaggccggccgccagcaggctgtccatcagccagcctacggcgtcagggtggtgatacagcgatccgggcaacaggttaatcgccagctgatgtttcccgagcggcagctggccggcgagagcgaatgcatacgctttgctttcaagatcaaaacggtagcgatcctccgccgcaatggcggcaaacatttccacgggagagccgccggttgggctgcggatcagagcctcgaaggaagaaactcgctttttagccggctcgacaatagcctgcagagcaaactggcaaggttgaccgggcaggtgctgcggcgcggccgtacctgacgcgggcatcatcatccagcgagagggctgcagcggctcgggcaggcaatagcggccgccgtcggcaatgaaggcgctaagcagccggaacatccggtcgttgaccggttcggtgaccccaaacgtgctaaagcgcagaatttcctccagcgcgccatcggtttcaaacagccggagatccagtatgcgcattccggtgccgtgaaaacgtcggtaggctgagtaatcgcgcatcagctccactacgtcgcgatgacgcgggtcgctttggatttcgctgaacagcgactcaagtgcctcctcagtcccttccaggacctggaaaaactgcaggccgttaaacagcagaatgccggtgatgccaaggggcaaatttttactgctggcgcgatggactaaagcgtcgagatcgacgggcgggcggtcaggatgaacctggctgcggtaaatcagggtggttagcatagttgttacgatcgctcccgcggcgtaagaacatccgcgctcagcatgcaagatgagtatggcctgaccctaaaggagggcgaggctgatatgtacaaacattcaaccaaccgtgatgtccgctacgcggaacgcgagcttcactttgtgattccctccactgtacagggaattacacatttggctatctttttctcatcctcaatgcaaaaagacgctaacaggcctctcattccctcctcagacactggcgctgcgtcttattttacctgttaatattagctaccaggaattatcctaccattctatttcccactctcaaaaatgaggcgctggtcttgcctgaatataatcgagtgaatattatcactctaaattaaattcttttgtcaggtttgatatgagcgacttctttattattttgtgtctgattttatgtcccatcatttctttatggagtggcttttcctatattcaggaaaggcgcaagagacggtatgttttccgttccagaagatgattgtttgacagaataaaatgacgagttgtatcagcgtttggcgagcagttgcacaaggttgttaaactgctgacggctattcaaattaaatttactcataatattctttttatgtgaatgaatcgttttgggactaatatttagcgcagcggcgacttcatgcgggctcaggccaatactgaacgcgtaaatgactttggtttgcgcgtcgctgaccgacctgcaggcgcaattaatgcaacgccgcagacgattgaacggcgggtcttgccgcggtagcagcggacgctcaatggcgttagctatctcatctttcagccgctgaacgcgagcgtgaggcggcataaataccgcatgctgcagacaattcggtaaaccctcatctacggtagcgtgttcattgtccgggaaaataaaaagcgtatattgttccggggcatgctgaaaaagatcctggcacaagtaccactcccccgcgaccatttccgtaaatatcacatcagcttgcgccatcgatcctgcatcccattgttgagaaaactgatagtgtggccgcccggcggccttcatcgcttcatcaaccagttcagcaatagcgactcgcaaatagtgattttttatattgaacaaaaaattagtcatataacttccctgtgggcattaaaaaacatatctggataaattaaagaatataatgatgatgcaggtactatttttagccgtggtaatctaagggatgttttccattaatgcaatatctggtggggaaagtgagataacggtatattgatatgcgaaagttcctaataaacaaaaccttaagcatatatttgtaactatttaaagccgtttgctgtttttttatttttgcgatgcataaaaagcttagtgatagccgcgctctgttgttaaaattagcggaggacaagaatacaggatgtatgccgtacttatgaagcagatgctctatttgaaaatgctggcgtggctggaggataatatctattgtaacccggcgatcgatgacctggcgctgtatatgggctattcacgtcggtttgtgtacgacgtgttttaccagtatggccagttacccatcgggcagtatattcgtctgcggcggttgaccatcgcagcggtcagtctgcgcttaacacggcaaccgatcgccgctattgcctggcagttaagctatgactcgcctcagaccttttcccgggagtttaagaagcgcttttcgctctcgccacgtgaataccgttgcgcggcgcactgggacacggcaaagctgttgaaaaagtttcacccggacggagagagcctacctctggctcgttttttttctcttccggaacaggtctattacggctatccgatgaagtatgaactgcgcctgtcggatttggtgttgcaaagcaccgctaagacgagcatcagacaaaaggttgaccgttttttcaccgctggcggaggctcgctttccgtactttccgactacgccgcggcgagtaaaaatgagcttaacgtcgaggttaacgcttttgtcggctgtcatgaggcgggaaagctgccccccgcgctggccatgaaaagctcgctgaccacccggtcagggctttatgtcggggttgaattctacggcagctggtcacgttatgctcgtttatccagcgatctgtatatggagctgctgccatccctgggggtaagtcgtcgggacggctatgacattgaatgttttataacccgccatgcggaaggcgaagaggcaggggacaggcgctatcgcgtacgctattttatcccggtgacgctgtcggcagcgggtctgcggtctgacagcggtagtgggtcagggcctgcgccggggcgaagttaaggtggccggagccacccaggttaacatcaaagcgcaaaccacagcagccaggtgatgagaaagcccgtcacccccatgatggttgtcaagacggtccaggttttgagtccatccggcaccgagagtccgagatagcgcgtgacgacccagaatccggcgtcgttgacgtgcgacagcccgagcgagccgaagcaggtcgccagcgtcaccagcaccagttgcagcggctccagactgacaaccgcctgcgacagcagaccggaggtggtgaggatcgccacggtggccgaaccctgcgaggctctgagcaccagcgatagcagaaaagcggcgggcatcagcggcagatgtattgtctccagcgcctcggctaaggcattaccgatgccggaagcgaccagtacgccgccaaaggcgccgccggcgccggcgacgaggatcacgtccgccgacgaggggatcgcgctgccggtgacttcgcccagctttttcaggctcatccgccgacggatgcccagcgtccagctggccaggcccagggagatcagcagggcgaccggcggggtaccaatgacggtcatcagctggcgaaccgcgttttccggcagcagaagcgcctgacacagcgtcccggaaacaatcagcatgatgggcaccacgatcagcccaccgataaccagcgcattcggcggcggcagacgggtctgctgcgcgttaaccgagagatccggtacttccgccgtttgttgctgctccagcacgttaatcgacagatgataatggcgccgattgataaaccgggcgacaaaatagcccacgataccgacgaccaccgacaccccaatccccgccagcatcagccaaccgacatcgctatgcagaatgcctgccgcagccgctgcgccaggatgggtgggcagcgccacgtggacggttaacatcacgccggccatcggcaggccaaacttcagcggcgatacgtgggcgactttgctgaagccgtagattaacggaatgatgatgataaagccgacttcaaaaaagaccggggtgccgagaataaaagccacgatggttaaggcggcaatggttcgttttgcacccagtacgccggtcaacgttttcgccagcgattcggcgccgccggacatttcaatcagtacccccagcattgagcccagaataataatgctggcgatgtggccaagcaggccgcccatgcctttttcaatggtggttataattttatctgccggaatgccggtggcgaatgccaccagcagactgacgatcaggagcgccacaaaaggatgtgctttcgctttgatcactaacaggagcaacagcactacgctggctaacgcaataagtaacagcgccgatgtcgacataggtttgcctcgggtattaacaggtgtacagagagttatttttttagaaaacggcgtttattttttccggtagggcgagaaccaccccagcccggaaagcgtgtctgtccgggggatatattcgcagccgatccagccgtcataaccggttttatccagtagcgcatagagccacggatagtttatttcgccctcatccggttcatgacggtcgggcagggaggcaatctgaatatggcgatactggccggcatattcggtaataagatggcttaaattgccgtccaccttctgcgcgtgaaacagatctaactgcaccgccaggttcggcctgtcgacccgtttcaccatcgccagcgtctgatattgactgtggtagagatagcccggtttggtctgcggattcagcgcttcgatgagtatccgcttgtcgtggcgggcaaagcactccgccgcgtagcgcagattatcgataagcacggcctcgcaggctgcgcgatccgctcccggcggcaccacgccggccatgatatgcacctgcgggcaaccgagctggcaggcatactccagcgccagctcaatatcgcgtcgggcctccgcgcttctcccggggatggcggcgagcccccattctccggcgttgacgtcgccgggtggggtattgaacagcaccagctgcagctggttctcctgcaggcgctgtctgatttccccggcggcatactcatagggaaacagaaactcaacggcttcaaatcccgcccgggcagcggcggcaaagcgttccaggaacggcagttcggtaaacagcatggataaatttgcagcgaattttggcatggttttatctcagttcttttacttcgtcagcggtcaggtagcggatctcgcggttgccgagggtaaatatcagccgtgcggtctcttccagttcctcggtattgttggtggcttcgcgcagcgatgagccagtgaccaccggtccgtggttggccagtaaaaaggcgttatagcgcggcgccagcccggccagcgcctgggcaatacggtcatcgcccggccggtagtagggaaccaccgggacgtcgccgacgcgcatcaccacatagggggtaaaggggcggatacagttgtgcgggtcgagcccctgcaggcaggagagcgcggtcagatagtggctgtgcaagtggacgatcgccttgcaggccgggttgtgcaaatagaccgcccggtgaaaagtgacctctttcgatggtttatcgccggagatccattccccttgcagcgtcaccaccgacaaccgctgagcctgcagttcgccgaggcaggcgccggtcggcgtcgccagcaggttgccgtccggcagcagcaacgacagattgccagcggagccggtggcatagccgcggctaaacaacgaggcgccaatctgtaccatttcctctcgcagttgttgctcagtcatgacgaaactcctgctgggcacgggcaaagaactggatatcgccgaagttacctgacttcagcgccagggagagcggctggcgggtgtcacgcacccagggcacgccaggggagatggtcggcccaatatggaacgcctcaacccccagggtctgcgccacaatgctcgacgtttcccctccggccacaataaagcgggtaaatcctttcgtcttcagggcggcggcaagagcggcaaacaactgttccacccgttcgctgctggccttgtcgccatactgcgcctggatccgctgcagcgtttgcggctcggtggtggcatagatcatcggcgccagcggcgcatcgcgctgcgcgtccacccagtcagtcagcgtcctgacgtagctctccagatcggtaaagcaggcgcttaagtcgacggcgcgggcgggggcatgttgacgataggccgccacctggctgttggtcatcaccgagcaggagcccgagagcaccaccgccgggccggccagcggcatgccggcctgagcgctttcaccccgggcgccatggcgctgcgcccagtcgcgggcgaggccgatggcgaggccggaaccgccggagaccagcttcatctcccgcagcgccacgccctgggtgagcagatcctgttcgctgagggcgtcgagcaccacatagcgcaccgccggatcgttgactgccgccagcgcggcggcgaccgcctccggcccccgggcgacaatcggccaggcaatcagcgcggcttttccgcgcccctggcgctcaattaagcggcccaggtgcgcatcctccatcggcgtcaccggatggtggcgcatcccggactcattcagcagttgctcgccgacgaacagatatccctgatagaccgtgcggccgttaaccggcagcgccggggaaatcaccgtccgcgtctcacccagctcggccagcagggcatccagcaccgggccaatgttgccctgcgcggtgctgtcgaaagtggaacagtacttgaaataaaactgctgacagccctgggcctgcagccagcgcagggccgccagcgactggctgacggccatttccgccgggcaggagcgggttttcaggctgatgaccaccgcctcgctggtcagcggaatatcgcgggtcggcacgccattcagttgcaccgtcggcatgccgttgcgcacgaggaagctggcaatatccgtggcgccggtgaagtcatcggcaatgacaccaagctgcatgttgtctctcctcactgtttatggcccggcagggtaatgccgttgaaaatcttgatcaccgcgctgtcatcttcccgaccgaatccggcattactggcggaggtgaacatattcagcgcggtggtagcgagcggcagcgggaaggtcagcgcccgggcagtgtcattcaccagcccgagatctttgacaaaaatatcgacagcggattttggcgagtaatcgccatccaggacatgctgcatgcgattctcaaacatccaggaattacccgccgcgtgggtgaccacgtcatacatcgtctccagtgggatcccggcgcgggcggcaagcgccatcgcttcggcggcaacggcgatgtgcaccccggccagcagctgatggataatttttaccgttgagccaagaccaatgtcgctccctatgcggtagactttgccggccacggcgtccagcaccggcgcgaggcgggcaaaggcggcatcgctcccggaggccatcaccgtcatgtcgccggcggccgctttcacggcgccgcccgataccggcgcgtcgagcatcaatagctggtactccgccagcgcctcggcaatggcctgagcatcggcggaggcgatggtggacgacaccatcacgacggtgcccggcttcagatgggcggcgaggccgctctcgccgaacaggatcccccgcacctgggcggcattgaccaccagcagcacaactgcatccagttccgcggcgaacggcaccgcgctggggcccgcgcctttggcgcccgccgccagcagtgcgcgacagttgtcgggattgatgtcaacgccccaggtgttcaggcccgcctgcaggcaggcgcgggcggcgcccatgcccattgaacccagtccaatcacgcagacattagtgtgtgcagccatgctggtctccttgtgaatattagttaattaatgtgatttaatgatagaataaagcgttatcatgtgaaaatatgtgagagttatcacgaataacccacatgaatataaaaaattcacaggcggaaagaggctgcacaacggcgattcttgccctaaaatagcgtaaaaacagcggcaaagcgcgataacaacaccgggtgtcgccaggcccgtagcctgggtggtgacgcctggtgtgaaaaaatggtaaggggagagcggtgattccaatagaacgacatcagcgtattttagccctggtggagcagcgtggggcggtaagcattaacgagctgacggagatcctaggcgtgtcccatatgaccatccgtcgggacgttagtaaactggaggagcaggggctgctggtcagcgtctcgggcggcgtgcgcgccgtcagccggctggctgcggaacccagtcatctggtgaaaagcacgctgcagagtgaggagaaacaggcgatcggcgcgctggcggcgagtcatatcgctaaaaacagttgcatctatctggatgccgggactaccaccctggcgctggcgcgggcgatcctcgaccggaacgatctccaggtggtcaccaatgattttgagataacccagctgctgatcgatgccagccagtgcggcgtgatccacaccggcggcactctgtgccgggagaaccgctcctgcgtgggcgaatcggcggcgcgtacgttacgccacctggctatcgatacggcctttatctccgccagcggctgggacagtcgcgggattttcacccctgatgagaacaaggttaccgtcaaggagaccgtcagccaggtcagcgcgagaagcatcctgctgtgcgacagttcgaaatacaatcaggtggccacgttcatggcgttacctctgacccggttcaccaccatcattaccgaccggcatctctccgatgccgccgccagtcatatcgcccggcacgcctgcgaggtgctgcgggccggataacgcgcgcggccaccgccgggttagcgttgccagtgctcgatcagcgccgcgccgatcccggcgatttgctgatttcgctcggccatgctcgccggcgtatcccgcagataaatcaccacgatgcgctctgctttgttattcgggccaagcagggcgacaatcccgcgcgcaccccgttcgccagctccggtcttatcggcgataaaccagcccgccggcagcacggagcggatcaacggtccggcgacccgatcgtccaccatccactgcagcagctgccgttgcgaacgggcgctcagacgctggctggtcagcagcttgcgcagggtcgcggccatgctggccggggtagtggtgtcgcgggcgtcgccgggaagcgcctcattcagttccgtttcccagcggtcaaggcgggtgacgttgtcgccgatctggcgcaaaaaggcagtcaatcctgcggggccgccgacggtggccagcagcagattggcggcgctgttatcgctcatggtaatggcggcggcacagagttcgccgaccgtcatgccgtcggcaaggtgtttttcgctgaccggcgagtagtccaccagatcctgctggcgatagtggatctttcgctccagctgttcgtcaccggcatccacccgcgccagcactgcgccgcagagcactactttaaaggtgctcatcatgggaaagcgttcatcggcgcgccaggcggtcagcgtgcggccgctggccagatccatttctatcatgcctacgcggcccgacagctggctttcgctttgtttaatttgctcaagcggctgcgggctggcgtgtaccgccagcggcagggtggctaacagggagataatacacaggcgaatataacgcataaccacaatacatccttgagtgagggccgataaaggcgagtaaagaagcgacaaataagaataacccggcgttttgctgattcacaattcctcttttttccttcatcatttgtcatcttttatttcgaataatcaatatctagccctgcctaagcacgctattttttgactcaaggccgtgatgaactataagaaagtactaagtaccgcactctgtcgggcgtcgctatttgccgatcaccacgcccgccggtccctgcggttcgccaacgctatatgccatcccgggaggaactggtgcacccgataattaaggtcatgctggtgggcggtaaggcggacgggctgttggtcagcgtcgccgatgacgcgaccgaggtctcggtgacgcctgcgcagtacggtgcgctatccgggcaaccgttgagctaccgaattgttagccaaaccattgacgatgaacgctatttttttggcgttttcagcgacgcccatcaggatagcgataagctgacgcgggtcgccctgacccgtggaatgaaaaaaatgttctgttaaacccttcccgaaagggggcgtaagagggtatgccgggcgccgctgtgctactgtggcagccttctatttccagggccggacgcataatgattcagtacattcgtattcaaaattttcgctcagtgaaggatatcgcgctggagctcgggccgctgaacattgtcttcggccctaacggctgcggtaaatccaatatttataacgccatccacctgctgaccgctgccgctgagggcaggctttcggggtttatcagcgaagagggcggtctggagaatatgatgtggtccggggagcgttcgcccctcgatcgtcacccccgccggctgcaaatcgcctgccggaccgacagcttcgattatgagctgcagataggcttccctgaaaaattgccctatccgacgcaattcatgctcgatcctatcgttaaagaagagaatatctggctggccggctactcccgccggccttcctcccgcgtactgcagcgcaagaatcaggcggcgtttctcgtcgatgtcaccggggagaaaagtactttcaccgagagtatttatgaaaatgagtcggtgttcggtcagcttggcgagccgcaccgtttccccgaagtatcgcgagtgcgggagaccttgcgccgttggcggttttatcatgaattcgcgattggccgtcattcgccgctgcgtcagccggccgtgggttaccgttcgccagtcctcgacagcgatggccagaatctcgccgccgcctttcagaccattgtcgagatcggcgcggaggagattttgcatgaaatccttgccgacgcctttcccggctgccagttttattgtgaaaacgagcactcgcgtttcgctctgaaaatgcgtcgcgaagggatccgccgcccgctgctggcggcggagatgtccgacggtacgctgcgctttttgtgcctcgccgtcgcgctgctcagtccacgcccgccggcgtttctggcgatcaatgaaccggagaacagcctgcatcgcgacatgttgcccgcgctggcccggctgattatcgaggcctcgcgctacagccagatctggctgaccagccactcggcggagctggcggagcttatcgccgccggggcgccttgtcagcgctatgcgctggagaatcgcggcggggagacgcggattgtcgagtgaagcccgtcatccctgacgggggcgctggagtcaggcggggctctgcgtctctgcggtcggcagcagacggttgccgccgcgtagggtgacgaacgagagcagggtgaagctcagggttatgcagccgaggatcagataggcctgatggaagccgacggtgtcgtacatccggcccacccaggcggaaagcaccaccccggacagctgttttgacagattaaaaccgatcaggaacagggtggccgagaggcgcgggttaaaggcggaagagatatatttaaaagttcccaccagcaggaaggggatctcaaacatatgcagcatcttgaggatcaccacctcgactgccgatgaggcgaaggacgacccgagaatacgcaccgacatgatcatccccgcggtcagcagggcgtttttggcgccgatgcggttaacgatggccggcgcgcagaacatgatcagcgcgttgagcaactcgccgccggtggtgacgaagccaaacacttcggtaccgcgctgcggactggcgaaaaagcttttgaaaaagttggcgaactgctggtcaaacacgtcgtagacgctggcgacacccaccacatagacgataaagccccagaagcgcggcatacgcagcagttctgccgccgtacgcagcgaaaaggcctggcgattggcgcccagcgcctcgataacctgagcgctgttgctgctttccggccgcgacagccagagcagcagaccgagcaccagcgcaaagccggaggcgatccagaaggtgatattgggatcgatgccgaacagcacgccggttatcgaggcgcatagcgcccagccgacgcagcctgcgacccgcactttgccatattcaaagcggttggcccggctgacgcgttcgatataagcttccaccgccccggagccgctggagaaaacaatccccaggtagatcccgcctaccagcgaaccagcgataatattcatctgcagcagcggagagaaaacgaaaataaagaatggcgcgaacagaattaacaataccgtaatggtccacagcagatgtttgcgcaggccgagcttatccgacatcaggccgaacaccggctgaaaaataatggcgaataacgagatagacgagaaaacgatcccggtttccgttttagttaaatggttaacgtccgccagccacaccggaaaaaacgggaagtaggccgacataatgaaatagtaaaagaaaaagaacagcaggaaatagacaaaattatgccgttctcgtggcgccagttctgagaatttcatcaccatgatcccttgttattctgtttgtggggtgggggctgtcgcccccacggattaaaggcaacgcaatgagacctcgtaatgccagcgcgtttggctcaggagccactgcggcagcacgctgggggtccaggagtcatcgcctcccacccccatatgcaggccgtcgagggtgatccacacgccgtcttcggcctgcatcttgtgccagtggtcggtctccatcagctgacgggtgctccatggctgaacggagaagtggaaatgaccgctgatgtgccagcgcccccagtccagcgcctgggtatcacagcgcaggccgttttccgtcgggaagatgtagggggtggtcatcgccgccagcggctgctcccagcgggcgaagcaggcgctgctccgccggtcggggtagttctcatgcggccccagacccagccagctcaccggcgcctgctgatccgccacctggaagtgcagcccgacccgcggcagcggcggcagggtttccgcccgttcgccgtccactgccaaccgcagggttccgtcagcagtgaagtgcatgcgccagtggctgacaatcactacctcttcgccgcgcaggtagtgccagcggcagtcgacgagggtttcatttgccaggcgctgcgcatcgcactggacgcagtgcgcctcaagatcgtacaggccggcgcttctccagcgctccacccaggcgttggggtcgatacgctctacttcgctgaccccgatgtcgttgtcgagcggcgcgcgaataaactggtcacgcaggggagtcaacagctgctcctgaccgccaaccgaccagcggctcagcagacccgtccggcgatcgatggtccagcattgcgaaccggcgcggatctgccagacctcatcgctgacgataagatccggagcgccggcagacacggtgggcgccggcagcgccagcggggcgggcaggggaaactgttgccaggcgacgcggtgctccgcttctgaccaggcggtcgcctggggctgggtcacctccagcgtcagccacaccgcgcgggcgccttcaggcaggatcaggctatcgagcagcgttatctcgtcgctgccctcagggggcagcgccagggtcaggtcgccgtgatacaggggttcaccggccgcctgcacctgccagcgcagcacttcgttatcggttgggcggaacaggtattcgctgatgatgcgcacccgcagcggcgaggtcgacagcagcgtgaactgaaaatactgctgggcgtgcttcgcctccaccagcgacggatgcggcgtgcgatcgggaaacaccagaccgttcatacagaactggcgatcgttaggcttatcaccaaagtcgccgccataggcccagccgacgctgccgtcggcaaaggttttgcggatcgcctggtcggcccagtcccagataaacccgccctgcagccgcgggtactcgcgaaaggcctgccagtaatcggcgaagttgccgaggctgttgcccatcgcgtgggcgtactcgcaaaggatcagcggcctctgctcaccgggcaggctgatccattttttgatcccccatttggggaccgccgggatcggctggtcgcgttcgacgcgggcgtacatcggacagataatatcggtggcggtggtatccgcgccgccgccctcgtactgcaccggacggctcggatcgttgcgtttcagccagtggtacagcgcttcgtggttgccgccgccgccggactcgttgcccagcgaccagatgataatgcacggatggttgcggttgctctgtaccatccgggtgacgcgggcgctgaaggctggcagccacgccggatcgtcggacagccgattcatcggcaccatcccgtgggtttcaatattggcttcatcgaccacgtacagaccgtagcggttgcagagttcataccagcgcggcgcgttgggatagtgcgagcagcgcacggcgttaaagttgttctgcttcatcaacagaatgtcctgcaccatatccgcctcggtgaccacctgcccgcgcaaatgatgatgctcatggcggttaacgccgcggatcagcagcggtttaccgttgagacgcagcaggccatcggcaatctcgatgcggcgaaaaccgatgtcccacgcttcggcctccagcagttcgtcgccgcgccacagggtgaccacggcgcgataacagttcggggtttccgcgctccagtgcgccggcgtcgccaccgccagggagaaatcgacccgttccgcgtagtggccgcgctcatccaccgtcggggtacctaacggctgccgcccggcggcgatctgctcctcgccgcgccacaggctaaccccgacgctgagcccggcaagcgccgcctcagtcgcttcgatggtcgcctggacctgcagagtgccgtcgcgatagagggcgtcaagggctggcgtcaactgcacgtcgcatagccgttgctgcggcttattcagcagccataccgagcggaaaataccgctcatccgccacatatcctggtcttccagccagctgccggcgctccagcgcatgaccatcacgcacaggcggttgtcgcccggacgcagaaaggggctgagatcgaacgccgccggcaggcgactgtcctgcgaatagccgacccacacgccattgcaccacagatgaaacgccgagttgacgccatcgaaaataatctgcgtttgcccgttctcgcgccatgtgtcctcaaccgtaaagtgcagggagtagcagccggtcgggttatcctccggcacccgcggtggggtggtgtcgatgggatagcggacgttggtgtagatcggcgcgtcatagccctccatctgccagttggaaggcacaggcgtgccgcggcagtccggtagatcctgcgtcaaccactgcgcatcgacggcaaacgggctacgggcgtaagagaactgccactcgccgtccagttgacggcggcgggatgaaggtaggttatcgcgggcggcaagctcatcgcgccagctggcgaaaacgggatgcgctggcaggcggttaaggtgggtaatggtctggttctgccagtcttcacgggcgaggacggcgtgaaagtcaggagtgtggctgcggccggtatcgctaatttgcatattaaaccccggtaagtcagaaattgtcgttcgctaaacaggatgattaacgttatcgggtaatttgttttgtccagcaatctcgggggaatcgaaattaacagacgatcacgaaagcgggggcgaagcgctgttttttgtcgcgcgttaaacataaaatgttagcgcacgacattgttattgctgaggagaaaagatgccgcgtcgtaccgcaaccctggaggatgtcgcccgcgccgcgggcgtgtcccagcagacggtctcccgggtgctgaaccgtcctgaggtggtgtcagcccgcacccgcgagcaggtgatccgcgcgatgcaggcgctgcactatgtgcctaaccgctcggcgcagctgcttgccggcaaagcggcgccctccatcgggctgattaccgcctcgctgacgctgcacgccccctcgcagatcgccgccgcgataaagagccatgccagcctgcatcagctggaagtggcgatagcgatgccggcgcaggccgattttgtcgcgctgcaggcccggctggacgagctgcgcgcccagcatattcgcggggtgatcgtcagtctgccgctggagagcgccactgccgagcggctggtgcaagacaatccggatatggcctgcctgtttctcgatgtctccccggaggccgatgtctgctgcgtgcgcttcgaccaccgcgacggctgcggggcctgcgtgcgccacctgtgggagctggggcatcgcgaatttggtctgctggcgggaccggaaagttcggtttccgcccgtctgcgtctcgccagctggcgcgaggcgttgcacagtctgaatattgcccgctctactacggtgtttggcgactggagcgccgccagcggctggcagaaaactttcgagctcctccatctgcagccgcggatcagcgccatagtggtggcaaacgatcagatggcgctcggcgtgctcagcgcgctggcccagctcaatcgcagcggcagccgggcagtatcggtgaccggctacgatgacaccgccgacagcctttacttccagccgccgctcaccacggtggcgcaggacttcgatctgttgggcaaaagggcggtggagcggctgattgccctgatggcggccccgcagctgcggatccgcgagctgctgccgacccggctcatcgtgcgccagtcggcctggcctgtcgccgccgcggaggaccggcagcagaccctggcgcagctgaaagcgctggtggagaagctttagctgctggtcgttgaggctttattgaagttgagcatgctaacttcggcagcaaacgtagagaggtaaagcttatctgtctgcgaaaaatgcaaaacacaatctatccatgcaagcattgatttaccgccagtcatatggcggtttttttttgccccttccaccctgtaccgactgcttcagtccggctttccatctggcatatcctgccgcggcatgctagatcttgcttccgggagacgacgggagacaaggtcatgatggtgattgagggtaaagaggcgatcgcgcgggtggactggcagcgagtgcgaacgatcatcgccgaggccgggctgaatgagcgtgatgttcagcaactggagcaggcgttccgccagagcaccttctgctggtttggctatgagaacggtcagctgattgccgtggcgcgagccatcagcgactgcacctggagcagctatctggcggatgtggcgatcgtccccgctcgtcagggacagggctacgggcaacagctgatgctggccatccgggagcaactcctgccctttggcaaaatatttatctatgcggtggccgataaaattacgttttatcagcgctttggctttgccatgttgactaccggcatggtctgcgccagcgaggaaggcatgcagaaaatgcaggagcagggctatatccgtcagccctgaaaggtgacgcttagaaacgcctggcttaaacgtgtaaaccaggcgcaggctgtcagagggggcgttcgagcacgaaaagatacgcttcccgcgaccagaacagggcggtacggcggcgctccaccgacatggttttcacttcccatccctcacgggtatagctgctgagaaactggctcattttgtcagggtcggccttggcttcgccaaaaaacagactgcccagcagcccctctttatagatcactacccgacactctttcttcatcatcgaccctcctggcgaccggtttactgtggccgtctattgtccgtggctgcgacgattttgcaatcggagaaggcgtaaactgtttacggtactgcagcgggctgagcgcgaagtgctggcgaaaatggtggcgcagggtgccggcgctggcaaacccgcagcgctcagcgatctgatcgatgcccatcgtgctctccgtcaggtgctggcgggcacgcagcagtcgttcctccagcagccagcgggcgggcgttttaccggtggcctcctcaaagcggcgcaaaaaggtgcgcgtccccatgccggcgcgctgggcgagggaagcgacggtatggctggcggcaagatgctggtgcagatagtcaaacagctgaccgaggcgcaggctctcccggctgcgggctaccgggcgcaggacctgctgcgcctgaccgccgtcgcgatggggagagacgaccaggcggcgggcgacgacgttggcggcttcgctgccgaaatcttcacgcaccagatgcagacaaaggtcgatccccgccgcactgccggcggaagtcatcagcaaagcatcgcccacgtaaaggacgtcctccaccacctggatctgcggaaaacgggactgcagcgccgcggtgtagcgccagtgggttgtcgcctggcggccattgagcagcccggcggcggcgagaacgaacaccccggaacagatagaaataatccgacatccgcgggcgtgggcggaagccagcgcggcgcacagcgcctcggggaccggggcgtcgacgccgcgccagccggggaccacgatcgtatccgcctgggcgagaagttcaggaccgccgtcggtcatcaggcggatgccgccggtagcgcacagcggcccttcatcgacggcggcgacggcgaactggtaccagttgtcgcccatttccgggcgcggcaggccgaagatctccacggctacgccaaactcaaaggtgcacaggccatcgtaggcgagggcaaccacctgatgacgtgacggtgtcacagaaggggttgtcaggatgttagcgttttctgtcatggttgtcggcagatcagggtgatgggcgtcagtaaagtagtgttatcacagacaaggagaagacgccatgagtgtagtaacccaatttccccccgccacctccgctgaggctatccgctggttcagccataagctgcatcttgagaccgactgcgccgatgtgcacagcgcccagcgtgccggcgaggtcgacttcgtcctgctgcacgtggtcggcagcgaggaagccttcgccagacgtcacctgccaggcgcgcagcatctcccgcacagccagatcaccgccgagcgaatggcggcctggccggcggagaccctctttgtggtctactgcgccgggccgcactgcaacggcgctgacgttgccgcgctgaagctggccgagctggggcggccggtgaaaatgatgctcggcggactcaccggctgggaagatgagggctatgcgtttgcttccggtgattgaaaatttttcatgtaccatgaaatattctcgtttgcgacccaccactctgcatgccagtatctggacatatagccatccagaagtctaaaaattcaaataatgaactatcacggtgggcaactaacgcgcccaccgctaaggagacagcatgcaacgtcaacaggccccgttccgcgcagacatcgtcggcagttttttgcgcccggacagcattaaacaggcgcgtcagcagctggctgaggggattatcgacgccgctcagctacgcgagattgagaataacgcgatccgtcatctggttcagcagcaatgcgactgcggcctgcacgtggtcaccgacggtgagtttcgtcgcgcatggtggcatttcgatttcttcgatggcctgcagggcgttgaacgttacgatgccgagcaggggatccagttcaacggcgtgcagaccaaagcgcacggcgttcgcgtcaccggcaagctggcgtttggcgaccacccgatgctggaggatttccgctatctgaaaagcatcagcggcgacgcgcagccgaagatgaccattcccagcccgagcgtgctgcacttccgcggcgggcggaaagatatcgatgccacggtctacccggatcttagcgactacttcgacgatctggccaccacctggcgcgacgccatccgcgcgttttatgacgccggctgccgctatctgcagctggacgataccgtgtgggcctatctgtgctccgatgcccagcgccagcaggtacgtgagcgcggcgaggatccggatgcgctggcgcgtatttatgcccgggtgctgaaccaggcgctggagggtaagccggccgatctgacggtgggcttgcacgtctgccggggtaacttccgttcaacctggatctcggaaggcggttacgagccggttgccgaggtgctgtttggcagcgttaatgtcgatgccttcttcctggagtacgacaacgaccgctccggggatttcgcgccgctgcgctttattcgtcccggccatcagcaggtggtcctcgggctgatcaccaccaaaaacggcgagctggagaatccgcagggggtaaaagcgcgactcgccgaggccgcgcagtacgtgccgctcgagcagatctgcctcagcccgcagtgcggtttcgcctccactgaagaggggaatgccctcagcgaagaccagcaatggcaaaaggtccgtctggtgacctccatcgccgccgacgtctggtaattgctttcttagcgcagcgttgcaccgtgatgaggcaacgctgccatcctcttcgccactatcgcccacctgcgccgcatcctgctgttttcacaacctggcaccttttttgccttatcacctctggttagctgttaattctttattttttgcgctactcaggagtgaatcatgcaacgtagaacgttattaaaagcttttgcactctccgcctctgttatggctatgggtctctcctttcaggcctatgccgccgacaccatcaaagtcgggatcatgcattcgctctccgggacgatggcgatttccgaaacgccgctgaaagacgtcgcgctgatggccatcgacgacatcaacgccaaaggcggggtgctgggcaagaaactggagccggtggtggtcgacccggcctccaactggccgctgtttgccgagaaggcgcgccagctgctggcccaggataaagtggcggtggtgtttggctgctggacgtcggtctcgcgtaaatcggtcctgccggtgtttgaggagctgaacggcctgctgttctatccggtgcagtacgaaggggaagagatgtcccccaacgtcttctataccggcgcggcgcctaaccagcaggctatcccggcggtggaatacctgctgagcgaggacggcggcggcgctaaacgtttctttctgctggggacggactacgtctatccgcgcaccaccaacaagatcctccgcgcctttctgcatgccaaagggatccaggacaaagatatcgaggaggtctacaccccgttcggctacagcgattaccagaccatcgtcgccaatatcaaaaaattcgccgccggtggcaaaacggcagtggtctccaccatcaatggcgattccaacgtaccgttctacaaagagctggctaaccagggtctgaaagcgaccgatgtaccggtggtggccttctcggtgggggaagaggagctgcgcggcatcgataccaaaccgctggtcggcaacctcgcggcatggaactactttgaatccgtcgataatccgaccaacaaagccttcgtcgccgattatcgcgcgtatgccaaagcgcacaagctgccgaatgccgatacggtggtgaccaacgatccgatggaagcgacctgggtgggcctgcatatgtgggcgcaggcggtgaccaaagcgggcaccaccgatgttaacaaagtacgcgaggcgatggccgggcagaccttcaaagcgccgtccggatttaccctgaccatggatgccaccaaccaccatctgcataagccggtgatgatcggtgaaattgaaggcaacggccagttcaacgtggtctggcagaccgatgagcccgtccgcgcgcagccgtggagcccgtggatccccggtaatgataagaaacctgaccatccggtgaaaaccgtcagccagtaagcgccacggccgacggggcgggagcgtcgcgcccgtcggccgctgaccagaggagaacgacatgaacgcattgcgtctcatgagtgtgttggcgctattgctgaccttgctgccatggcgggcgcaggccgcggaggcggacgacttcgttgccgccagtcgcagccagcaggcgcagctgttgacccagtgggcggcagcgccgcaggcggatcgtctgccgctgctgcgggcgttgaccaccgagagcctggtgatggacgacggaaaacatgctttccgcacccgacagggcggattacagccattgggcgctgtcgccgcgccgcagggcgaaacccgaccggtccgtctgaccaacaggctgcgcaatctggctgccggcgcgctggccagccaccttattttaagtgacaacgtcacagagcgagcttccgccgcacgaacgctacagcgggaagcgaccccggccatggccgcgctgctgcaacagcggctgcaggcggaaaccgatgataatgtgcggggtctgctggaggtggcgctggcgcgcctgcagctcactcagcctgaggccagcgcgcggctggccgccgtgacgctgctcggccattccgcggacccggaaacccaggcgctgctgatcccctttaccgatgcccagcatgagccggatgcggcggtgcgcgaggcggccagcgatagcctgcaaaagatcaaacatcgtctgctgctcggcgatctgctgggccaggcctttatggggctgtcgctgggctcggtgctgctgctggccgcgctggggctggcgatcacctatggcctgctgggggtgattaacatggcccacggcgagatgttaatgatcggcgcctacagctgctggctggtacagcaggcgctggcgcagctcgcgccgcaatggctggccttttatccgctggtcgcgctgccggtggcgtttctggtgaccgccgggatcggcatggcgctggagcgcaccattattcgtcatctgtatggtcggccgctggaaacgctgctcgccacctgggggatcagcctgatgctaatccagctggtgaggatgctgtttggcgcgcagaacgtggaggtggcaaacccggcctggctctccggcggcgtgcaggtcctgccgaacctgatcctgccgtggaaccggctggcggtgctggcgttcgtcctgctggtgctgtgctttacctggctcatcctgaaccgcacccgtctggggatgaacgtccgcgccgtgacgcagaaccgggcgatggccgcctgctgcggcgtacctaccgggcgggtggatatgctggcctttggcctcggctccggtattgccgggctgggcggcgtggcgctgtcgcagcttggcaacgtcgggcctgaactgggtcagggatacatcatcgactcgtttctggtggtggtgctgggcggcgtcggccagctggccggcagcgtggcggcggcctttgggctgggcattttcaacaaaattctcgaaccgcaaatgggcgcggtgctgggcaagatcctgatcctggtgatgattattctgtttattcagaaacgaccgcagggtctgttcgcgctgaaagggagggttatcgactaatgagccaaccaatcaccttaacgctggcgcagcgcgcgccgcggcctctgcgctggctggggatcctgctggtgctggggctgctgagtatgccattcctggcgctgctgccggcctcccatccgctggcggtgccgagctggctgctgacgctgagcggcaaaatcctctgctacgccattgtggcggtggcgctggatctggtctggggctatgcgggcatgctgtcgctggggcacgggatcttctttgccctcggcgggtacgccatggggatgtacctgatgcgccaggcggcgggcgacggtctgccggcgtttatgtcttttctctcctggagcgagctgccctggttctggtggggcacgcagcatttcgcctgggcgatggcgctggtggtgctggttcccggtctgctggccctggttttcggctggtttgcctttcgctcgaagatcaaaggggtctatttctcgatcatgacccaggccctgacctatgccggtatgctgctgttctttcgcaacgagaccgggtttggcgggaataacggcttcaccggttttaccacgctgctgggctttcctgtcaccgccaccggcacccgcgccagcctgtttatggccacggttttgctgctgttgctgaccctgtggctgggctcggcgctggcgcagagtaagtttggccggatcctcaccgcggtgcgtgacgccgaaaaccggctgatgttctgcgggtacgacccgcgcggcttcaagctgctggtgtggacgctgtcggcggtgctctgcggtctggcgggggcgttatatgtcccgcaggtcgggatcatcaaccccagcgaaatgtcgccgaccaactccatcgaggccgccatctgggtggcgctcggcgggcgcggcaccctgattggcccggtgcttggcgccggattggtcaacggtgcgaaaagcattttcaccgtggcgatgccagagtactggcagctgtttctcggcctcatcttcatcattgtgaccctgtttttaccccgcggggtgatgggcctgctgcgtcgaggagaccgctaatgcaaccggatgaaggactatttacccgccagctgcccggcgatcgctttcgcgaacaaaccgatccggtgctgcagctggagaacatcaacgtcagctttgacggtttccgggcgctgacggatctgtcgctggcgataggcgtcggcgaactgcgctgtgtgatcggccccaacggggcgggcaagaccaccctgatggacgtgatcaccggcaagacccggccgcaaagcggcaaagcgctctatgaccagtcggtggatctgaccactcttgacccggtggccatcgcccgccagggcatcgggcgcaagtttcagaagccgacggtcttcgaagcgctgacggtggcggaaaatctcgccctggcgatgaagggggataaatcggtgtgggccagcctgcgcgcccggataagcagcgaacaggacgatcggctgaatgaggtgctgcgcctgttgcgtcttgacggcgagcgctaccgccaggccggtctgttgtcccatggtcagaaacagtttcttgagatcggcatgctgctggtgcaggagccgcatctgctgctgcttgatgagccggcggccggcatgaccgatgcggaaacggagtatacggcggagctgtttcgtaccctggctggacagcactccctgatggtggtggagcacgacatgggatttgtcgagaccatcgccgaccgggtgacggtcctgcatcagggccaggtgctggcggagggatcgctgcgggaggtacaggccaatgagcaggtcattgaagtttatctgggacgttaaggagcgccaatgttacaggtgagtcagctacatcaatactacggcggcagccatattttacgcggggtggatttttccgcccgccagggcgaagtcacctgcctgctggggcgcaatggcgtcggtaagaccacgctgctgaaatgcctgatggggctgatcccggcgcgcagcggtgaggtacgctggcaggatcagaacatcacccatcgcaaaccgcaccagcgggtgcaggccggggtcgcctacgtcccccaggggcgcgagatatttccgcgctgacggtggaagaaaacctgctgatggggctgtcgcgctttcccgcccgcgaagcgcagcaggtgccggaggagatctaccagcttttcccggtgctcaggaccatgaagcagcggcgaggcggtgacttatccggcggccagcagcagcagctggcgattggccgcgcgctggccagccgcccacagctgctgatccttgatgaacccaccgaggggatccagccctcggtcatcaaagagattggcgaggtgatccgccagctggcgagccgcggagacatggcgatcctgctggtggagcagttctatgactttgccgccggactggcggaccactacctggtgatgtcgcgcggcgccatcgtccagcaaggcaagggtggtgatatggagagcgacggcgtgcgcgccatggtgaccatctgaccatgccggcggcggtcgcgccgccggtttgcggcctatttgcgcagcagccgctgcaggcgcgcctggcgccagtttttaatccattcgccgaacacgaacaggcgtaatcctctcaccaccagcagggcgccccagatcagggcgacccagccggaccagtagtactgtggattagtgaagcggttaagcaccgccagcagcacgcaaaccaccagcgccaccgacagcgaacggaaaaagcggctctcctgatgcacccgcgctttggcttcctctatgcgcagatccagtgaggcttcctggcccggcgcgtcttcccgccgggcttcgccgccgatctcggccaccgtcacctcaaagaccgcggcgagggcgctgagggtctccagccccgggcgttcgccattctcaatgcgctggatcgtgcggacgctgagacccgccatttcggccaactgctcctgggaccaggcgcgctgcagccgtaattgtttgacctgattgttgctgttcatattcgtatgctccataacgttctgcggatgtaaacctgtgatggagtatggtgaaccgggccgccagccaccacgacagcgacccgacaacggcccgacagcaacctgacagccgcatgccagctggcgtcaggcgttggccagcggagaatccggttgccaggggcgggcattgatcccgcggaaaatcatcagccaggcggcgacaatcgccacgataagaatgacaaaaagcgaccagtgcggcagatgggtgaggatcaaccccgtcagcatcgggttgaatgccgcccccagccaccccagcgactgggcggagaagtagctggccttcatccccggcggggcaatatggtcaatcagcatatactccccgggggcataaatcacttccccgagggtgaagatcgccgccgagatcccccacgcccacaggctggcgccagagaacataaagcccacaaggccgatcacaaagcagacggtgccgaaggtcatcagcgggcggatatttctcgcgctcagccgccggccaaccgcgtactgcagagcaaccaccaccgcggcgttgaccggcagcaccacggccaccactttctcggcgaaatcgctgctggcgaccaccagcacatactgcgagagacaggaggcgaaggcgccgccgacgaaggaggccagcagcccggagcaggtaaaccacagcagcgcccggtcgcgcagcaacaccgaaggcgaccagggcgcggcgcccggctgggccgcggcggcgtcatcccgctgaagaaacagctgaataaacaccagcggaaaggcggcgcaggcggccgccagccagaacggcaaattgatactgtgcattaccagcagggtgccgatgggcggcccaacggtccagccgatgttgaggatggtgtagttcagcgagaagatgcgcgcttttttctctgccgtcagccgatcggcgaaccaggctttcaggacggtggaaaagaccgagtaggcgcagttgatcagcgcaaagaagatcaccaccaggagggcgttattgaccagcggtattgcgctgaagccgagaataaacaccagcactgaccacaccatatagcgctttttatcgaacctgtcagcgaggatgccaaaacccatgctgaacaacaccccaaccaccagcgccagcgacagggcatagccaatcacatccacctccagctgaaagcgtcgggtgagatagatggtcataaacggcagtgtggccccgcggccgatagtcaacagtaacgacgatgccagcagcgcgatggtggagcgccggagagtggtgatcatgatttccttgcctgtcatgttgttataattttatgtcttcgatcacaaataacacggtcattacgccttgtacaggtcatcgcggtcgacgggcgcacttccgggcctgccaaaaataatgatctatcccggcggccgctttttcgctactttgattttgttcacaaaaattccaataacgacagaggcaggggtatgacgaggaaagatggactactggcgctgctggtagtggtggtgtgggggcttaactttgtggtgattaagctggggttgcacaatatgccgccgctgatgctggcggggctgcgctttatgctggtcgccttcccggcgctgctgtttgtcgcccggccagctattccgctgcgcctgctgctgggctatggcctgaccataagtttcggtcagttcgcctttctgttctgcgctatcggcctgggtatgccggccgggctggcctcccttgtgctgcaggctcaagccttcttcaccatcatccttggcgccttcgtctttggcgaacgtctgcagggcaagcagctggcggggatcgccctggcgatctttggcgtgctggtgctggtggagggcagccttggcggggagcatgtgccgctggtgggctttatgctgaccctcgcggcggcgctcagctgggcctgcggcaatattttcaacaagaaaatcatgtcccaggcgagccggccgccaatcatgtcgctggtggtctggagcgcgctgatcccggtgctgccgtttatgctggcctcattgttgatcgatggcccgcagaccatgctggcgagtctgcaacacatcgatctgctaacgatactgtcgctgctttatctggcgtttatcgccactatcgtcggctatggcatctggggatcgctgctggggcggtatgaaacctggcgggtggcgccgctgtcgctgctggtgccggtggtgggaatggccagcgctgcgctgctgctcggggagacgctgagcggactgcagctcaccggggcggtgctgattatggccgggctctacattaatgtctttggcttacgtttggtgcggcctggcatggcgcgcggataaaaaaaagccccggagacggggctatacacaattatgcgtgtaatggcatcacaggtcgtgctgctggtagtacggcacgccaagttcgtcagatttatcattaccagccgccatatgattgaaatcaaacggcgaatcattatgttcggaagggataatcattgtatcacgctggttttgacgcaccggcgtggtgttttgctccgcatagctgaggctggaggccagcgacaagagtacgatagctgcggcagcgaatagtttcatgatttcctcaatacgtcttttatagtgcaggcgattaacatcagttatttagcggatgtagatagcgggattcgccaggtacattcgttatgcgatacttgtggggcggaacatcgaaatagttcttgaacgttcgcgtcagggtctgctgcgactcgaaaccatagcgttccgccaggtacaggattggctcattactctgcttgagcttctgcgcaatctccgtcagcttgcggctgcggatgtactggccgagggaatggccggtctctttcttaaacatacgttgcaggtgccacttagagtaaccggagcgctcagacactttttccagcgacaggggcgattccaggttatcctcgatccacgacaaaatactatggatagtgatggcgtcattattacgtctggacatcatcttacctcttcttatttttacggcaggaccttcttgagcagttgctcaagcatggcgacttcgtccgccgacagatttttcgttaactcctggtgtaacttctgacccacaacctgatgacactgctcgcaaagggctgcgccgtccggcgtcaactgcaccagcacgccgcgcttgtcagcggggttgggtaaccgttcaatccagcctttgcacgccaggcggtcgagcatgcgcgtcatcgcgcccgggtcgacggaaagcacggttttcagctcaacgggggtaatacatacttcgcaacgaatggagcagagcacgcgaaactgggtcgcggtaatatccataggtgagaggtagtcattgagcaggcgatcttttttctggttaaccatctggatcaagcggcccagcgggatcatttcattaaacaggtcgctggtacttttcataatggttgcccaggcaagtaattagttgcaagtgatactattgcccaggcaatcataagtcaacattatgaattggccgatgccacgatttgctaaaatggaaaagtacgatgtgggtcactctttatgatttttctaacgcttgttatttttttgcagaagtgatttatcagcaggctggcgtcaaatttgttgaagccgatatactcacggaatgaaaccattcttaaaaaatgaatattaacgggactttaattaactatgttcgatttgtttaaagcaatagggctcggcctggcggtgcttttaccgctggcgaatccactcacaaccgtggcgctgttccttggcctggccggtaatatgaacaacgccgagcgtaataaacaggcgttaatggcatcggtgtatgtcttcgccatcctgatggtgtcgtggtatgccggtcaggtggtgatgaatacattcggcatatcaatacctgggctgcgtatcgccggcggattgattgtggcctttatcggtttccgcatgctgtttccccagcaaaaagcccacgattcgatggaagcgaagatcaaatcggaagaactgcaggatgaaccgaccgccaatatcgcctttgtgccgctggcgatgccaagcaccgccggtccgggcaccatcgcgatgattattagctccgcctcgaccgttaagcacggcgtggacttcccggagtgggtggtgctggcggcgccgccgatcatctttttgctgttaggggtgattctgtgggcttgtctgcgcagttccggcgcgattatgcgtctggttggcaaaggcggcatcgaggccatctcgcgactgatgggctttctgctggtctgcatgggcgtgcagtttattattaacggcgtgctggagatcatttcgacctggcatccctgaccgcccgcgatgcgcagagaaaaaaagcccgccggcgcgataccggcgggcttttttgtgcgacggaatcaggagtggtgcggctgatggtcttccagcgataccggccagcgacggaatatcatcagcgaccagaccagcgcgaccagcgccggaatggcgccgacgtagccgacggaggccatggaaagatgcagactcacctggctgccgaccagcgccccggcgcctatgccgatattaaagatgcccgagaacagagacatggcgacgtcggtggcatccggagcggaggccagcactttcacctgcatgccgagaccgataatcatgatcgccaccccccagaagatgctgagcagcatcaggtgctgcgggttatgcgaggccggcagcagcagcagcaggcaggcgagcagcagggcaatcgccaggcttatcagccccgacgcgtgctggttaccgagtttaccgaacagaatgctgccgataataccggccccgccaaggatcagcagcagtacggtggcaaagttgccgctcaggcccgctaccgtctggacaaagggctcgatatagctgtaggcggtataatgagcggtcaccaccaccacggtcagaatgtacacgctgaccagcgccgggcggcggaacagcaccggcaggcttttcagcgagccagaatgttcgctcggcagggtcggcagcagttttacgaggcaggccagggtggctaacgcgccgaggccgatcgccaggaaggtcatccgccagccaaagtactggccgataatgcgcccgatcggaataccaaacaccatcgccagcgcggtgccggtggcgatcaggctcagcgcctgcgcccgtttgcccggcggggccatgcggatggccagtgccgacgttatcgaccagaacactgcatgcgcaaaggcgataccaatgcggctgatcactagcacgtcaaaattccaggcaaaaaacgacaggacgtggctggcgataaacagaataaacaggccgataagcaggcgccggcgctccactttgctggtcagcagcataaacggcagcgacattaacgccaccacccatgcgtagatggtcagcatcatgcccacctgggcggtttccatgccgaagctgtcggcaatatccgacaacagaccgaccggggcaaactctgtggtgttaaaaataaacgcggcgatggccaacgtcacgacacgtagccacgctaccttgcgtgagaccgtattcgtagtcataagctctggactggtgattcagggaaagatgtgacgctgatcttaaaacgattgttggcgaaaagacaatcattttgtgatctgcgtctcatttcatcgcaaggggctggccgcggttaagcgattaattttgctatggatagtgtcaagggggcgcttttatgtcatgttgaaggaaagtaaaaaaagtaaggacagggtatgcaggaaattcaattttatctggtcgatgctttcagcgataaaaactttggcggcaatgccgcggccgtctgcccgctcagcgagtggttagccgacgatgtgctcctgaaaatggcccagcagcataatcaatccgaaacggctttctttgtccgtaccgacgagggctatgagctgcgctggtttaccacactcgctgagatcaatctctgcggtcacgcgaccctcgccgctgcgcacgttattttcgaatatctcgaccatccttcggcgacgattctctttagcacccgttttgttggtgagctgcgggtcacccgtaatggcgactggctgacgctcgatttcccggcgtggtcgacctccccggtggaaaacccgccggtggatctgctgaccgggttgggactcgaggccgccgttgaagttcgggaaggacgcgattatctggtggtgctggcggatcgccagcaggttgaagcggtgcgaccggatatggcgcggctgcgaacgcttggcaaaatgatctgcgtcagcgcgccggatgaagagtatgactttatcagccgcttcttctgcccgggagaaggggtgccggaagatccggtcaccggctccgcccatagcatgctgatcccctggtggggcgaaaagctggggaaaaccaccatgatggcgcgccaggtctccgctcgcggcggcgacctgcgctgccagtggcagggcgaccgtgtgctgattagcggccaggccaccacctatatgcgcggaacggtttacctgcgttaatcatggcccccgcgtcgccccggagagcggcaatctacttccgctccccggggcgacatagcattagcccagcgatgcgccgccacacatcaccagctcctgtccggtcatcgccgatgcgccctcgctcagcaaccagctcaccagagagaccacttcctgcggagtaatcagtcgcccaagcggcggaagccgcggcggggaactttctctgcctggctgatgaagcatcggcgtatcggttgcgccgggggccacgacgttgaccgatatcgtcaccgacgcccacctgccggataaaacccgcgaggcgctggagaccctttccccgcagctgatcattgccgactgactcgcaggctgccgtcagggcagacgggcgatattggccttgatcaccgcgatcgactggctgaacttcgcctgctcttcgccggccagctgcagttcaatgatctgctttacgccaccctgggccagcaccgccggcaccccagccgccgcgccgctgaccccgtactcgccgtcaagaatgcaggagaccgccagcgcgcggtggctgccggtgaagatattgcggcatatctcggcgatggtccctgccacgccatattcggtgcagcctttacccgcgtagatctcaaatcccagtttgcgcactttgtcagccatcgcctcgcgatcgagcggcaggccggtgcgctgctggtagaggtcggcgattggcgtgccatataccgaggagtgcgaccacaccggaaactgggtatcgccatgctcgccgaggataaaggcgtcgatgctctgggcgccaatctccagttcctgcgccagcaggcgacgcaggcgggtggtatccagccagacgccggtgcccagcacctggctgcgcggcaggccggaaagctgccatacctgccaggtgatgatgtcgcaggggttggtggccaccagaaagatgccgttaaatccgttggccatcatcgtcggcacaatgctcttcacaatcttcgcggtggaggttagttcatccagccggctctggccggggcgcagcgcgccgccggagacggtgatcaccgcgatatcgacatcggcgcagtcgctggcctcgcgggtggagatggtcatcatccccggcaggtaggccgcggcgtcgctcaggtcctgagcgtgggcctcagcgcgctgttggttaaggtcgacgaggatcagctcctcgcaaatgctctggttgagcagggcgtaggccgccgacgcgccgacattgccggcgccaataatcatcactttacgggctttggtgtgcatattcagatctcaagtacgaacagcaggggataaaattactgtgtttcagttggttagcgcaataggcgggcggcaatataagttaatgctatgtcgggaaaagccgccggccgcgctacagtggggtaaaaaaggagctcacctatgtacaccatcaccgacatcgcccctaccgacgccgaatttatcgccctgattgccgccctcgacgcctggcaggagaccctctacccggcggagagcaaccacctgctggaccttagccagctgccgccgcagacggtcatcgccctggcgatccgcagcccgcagggcgaggccgttggctgcggggctattgttctcagtgaggaaggctttggcgagatgaagcgggtctatatcgatccccagcaccgcggccagcagctgggagaaaagctgctggcggcgctggaagcgaaagcgcgtcagcgcgactgccataccctgcgcctggagaccggtatccatcagcatgcggccatcgccctctacacgcgcaacggctaccagacccgctgcgcgtttgcgccgtatcaacccgatccgctcagcgtgtttatggagaaaccactgtttgccgatcttcgttcagcagcgctataaacgcctccagctggcgggtcttggcgccccggcgccacaccagccaggtggtgagccagcgccactcttcggccagcggccaggcggaaacctgctgatggccgggcatactctccagcatgctgcgcgggatcaacgccaggccggcgccggcgatgacgcaggccagcatcccgtggtaagactccatctcgtggatcctgcccggggtcgctctgtcggcatgaaaccagctctcaaaatgccggcgataggaacagttggcgcgaaaggcgtagacgttggccccgttcacttcgctggcgcgggtgatgggtgcgtggccgtagggggcgacgatcatcatctcttcagggaacaccggcagcccctccaggcccggatgcaccagcgggccgtcgacaaacgcggcgctcagggcgccttccagtacgccgtcgatcatcgtcccggaagggccggttgagagcgccagatgaattttcgggtagcgctgattaaagtgggccagagtgctggggatccgtaccgccgcggtgctctccagcgaaccaagtgaaaacagcccctggggttcgtcgcccgccaccaccattcgcgcctcgtccaccagggcgaggatctgctggctatagcgcaaaaagctgtgtcccgcaggcgacaggcgcaggcgctggttctcgcggataaacagctcaacgccgaggtcggcctccagctggcggatgcgggtggtgaggttggacggcacgcgatgcactttctgcgccgcctgggtaatgctgccggtgctggcgacagcgttaaacatctctagctgagtcaggtccatggtattcttcttttgtgaatgcgttgcttaatattattcattttcaatgaatggaaaggtaagccagaatacggacacttcgcaagcaacgagagagaataatgatgaatttatctgcaacgcacgccgtctccgtcaatccgactaccggtgaggtggtctcctcgctgccgtgggccagcgaacgcgaggtcgacgcggcgatcacgctcgccgcggcgggctatcgccagtggcgtcagacgccgcttgccgaccgcgccgatgccctgcgccgcatcggggccgcgctgcgcgcccgcggtgaagaggtggcccagatgatcacccttgagatgggcaagccgatcgctcaggcgcgcggcgaggtggcgaaatcggccaacctctgcgactggtacgctgaacacggcccggcgatgctggcgacggaagctaccctggtggaaaataaccaggcggtaatagagtatcgtccactgggtgccattctggcggtcatgccgtggaacttcccggtctggcaggtgatgcgcggcgcggtgccgatcctgctggccggcaacagctatctgctgaagcatgccccgaacgtgatgggcagcgcccgtctgctgggcgagatttttgccgccgccggcctgccggatggtgtatttggttgggtgaacgccaccaatgacggcgtttcgcagattatcaatgacgaccgcatcgcggcggtgaccgtcaccggcagcgtccgcgccgggaaggcgattggcgcccaggcgggcgcggcgctgaagaaatgcgtgcttgagctggggggatccgatccctttatcgtgctcaacgatgccgatctcgatgaagcggtaaaagccgccgtcaccggccgctatcagaacagcggccaggtgtgtgcggcgtcgaaacgctttattctcgaagccggcattgccgaggccttcacccgcaaatttgtcgacgccgtggcggcgctgaagatgggcgacccgcgcgatgagcaaaactacgtcggaccgatggcgcggttcgatttacgcgatgaactgcaccagcaggtaacggctacccttgatgaaggagcgactctgctgctgggcgcggaaaaaatcgaaggggcgggcaactactatgcgccaacggtgctgggcaacgtcaccgccgggatgaccggctttcgtcaggagctgtttggtccggtagcaaccctgaccaccgctcgcgacgctgaccatgcactggccctcgccaacgacagcgagtttggcctgtccgccacggtctataccaccgacgaggcgcaggcccagcgctttgcccgcgagctggagtgcggcggcgtcttcctcaatggctactgcgccagcgacgcccgcgtggccttcggcggcgtgaagaagagcggttttggccgcgagctgtcgcattttggcctgcacgagttctgtaatgcgcagaccgtctggaaagaccgtcgctaatcaacgttagcccctgacgaccgtcgtccacgtctgctatactcgcccaccgaattttgatggtgggcaaggagccgcgtgtggcgacggttatcaataatgcaatgctggaagccattctggcagaaatcaggccgctgattggccgcggaaaagtggcggattatattccggcgctggccagcgtcagcggcgacaagcttggtatcgcgatcagtacggtggacggtcagcactttgccgctggcgatgcccatgaacgtttttccatccagtcaatctccaaggtattgagcctggtggtggccatgaaccactatcaggaggaggagatctggcagcgggtggggaaagatccttccggccagccctttaactcgcttctgcagctggagatcgagcagggcaaaccgcgcaacccgtttatcaacgccggggcactggtggtctgcgacatgctgcagagccggctcagcgccccgcgtcagcggatgctggagattgtccgccgtctgagcggcgtggccgatatcgcctacgatccggtggtggctcgctcagagtttgagcattcggcgcgcaacgccgccatcgcctggctgatgaaatcctttggtaacttccataacgacgtcgccaccgtgctgcagaactatttccactactgttcgctggagatgagctgcgttgagctggcgcgaacctttctatttctcgccgaccgcggcattgccccgcatctcgacgcgccggttattgcgcccatccagtcccgccaggttaatgccctgatgatgaccagcggcatgtaccagaacgccggtgaattcgcctggcgcgttggcctgccggcgaaatcgggcgtcggcggcgggatcgtggcgattgtcccgcaggagatggcgatcgccgtgtggagcccggagcttgacgacgccgggaactcgctggccggcgtggcgatgctggaaaaactgactcagcggatggggaggtcggtgttctgatggtcgatcaggatcgcttgtttgcgcgcctggcgcgctcgacgtttcgctcacgcttccgtctgggggggaaagagcggcaatattgtctcgataagggaccggaggtcatcgatcggcatgccgcagactttattcgccagcggctggcgcccgctgcgccgatcaatgatggcaagcagacgccgatgcgcggtcacccggtgtttatcgcccagcacgcgaccgctacctgctgtcgcggctgcctggaaaaatggcatgccattccccacggccgcgcgctgagtgagccggagcaggactatatcgtgcaggtcatccaccgctggctggtgctacaaatgaatgcgccgtctgtgcgctaatttgcatttgatcggcgccggagtatgcctgataaatattctcatgttatgataatccgctaactaactattaacataataatttcctgaaacaattagacggataattactgaatgtcttcactgtcgattcggtcatttacgctgtttcgtgaagaacaacccgtgcgcgatgcattggtcttatttacgttaacgctactgctgcattttcttggcgctatgctgcgtctggtgcaggagctctctttcttctggccgctcaatgcagtgatggccgggatttttgcacgctatgtatggcttaaccgcagctatttttatgccgtctgttttgcggcaatgctggtctatgacggattaacctcgcgctggggaatgggctttgcctcattgctgattaacttttccaatattgtctttattgtgacgctggcgcagctggtgctgtgggataaacgtcgcgccgactccatgccgggcccgataaacgcgcttaatttattctgtttctgcctgttagccgccttactgtgcgcagcggtcggcgcgctggggtcggtggatgttgaacgcgccaccttcgttccccagctggcggactggtttagcgaacagttctcaacggcagtattaatcctgccctttattctgaccctgacgctgccttcggcattaagcggttttcgctttcgccagctgctgccggtgctggcgctggtcctgtcaattgcgcttggcgtggcggtaggcggcgcgggcagcattaccttcccgttgccggctttgatctggtgcgctgtacgctatccgctgccgctgacctgtctgctgacttttctcactggcatcggcgaaatactgctggtcgctaattcgttaattcacttttcgccagatgcgcgaatgcagccgtggcagctgttctccacccgcctcggaattgccgccatgctgattagcccggtgattgtcgcatccagtgtcgaagcgattaacacgctggtgaagcagctggccctgcgcgccgattttgactttcagacccgcgtctattcccgttccggactgagcgaagcgttgaagcgtcagacgctgccggcggataagctgctgacggtgatggtgctggatatcgatggcttcaaacgggtgaatgatgctctgggccatgaaggcggcgattgcgtgctgacccagtttgcccagcaggttcgacagctggtgggtgagcaggggatggtggcccgtatcggcggcgaagagtttgcggtggccgccgtcgtcgacagcgcccagcagggctatttgctggcggaaaagatccgtcacggggtggagtcgcagcctttcggcctgggccagaacccgatccacctgaccatcagtctgggactggagacgcgcgaggtaggccacgcccgcatcaccgagctgtttaaccagctgctgttggcggcggacgatgagatggtgaaagccaaacagagcggtcgtaaccaaatttgtatgccgacgctgaccgaaagcgcgccataagaaaatcctatcgggatcctacttgtgctaatttttggttaaaaacatagtgatgtggtcgataacagggagcttttatgaccacatccttttcactgcgcacgctctcgcgtgacgatattctccatcacctcccggcattaagcgagatcctggcaagctgcgtcaacggcggcgcctcggtgagctttatgctgcctttcgcgccgcaaacggcgataacgttctggcaacgcactgccgacagcgtggcggccggggagcgcattgtgctggccgccttcgacgcggaggaacgtcccgttggcaccgtgcaacttatcaccagtcaaccggaaaaccagccccatcgagcggatgtcgccaaattattggttcaccaaaatgtccgccgcaaggggatcgcccaggcgttgatgagcgagctggagcgcattgcccggcgggaaaggaagacggtgctggtgctggacacggcgaccggcagcggggcggaacagttctatgcccgctgcggctgggaaaaagtgggggaaattccgcgctatgcgctgatgcccgacggcgaaatgactgccacctcactattctataagtttctgccctgacggccgctattgcagattgctttgatcaaaacagggtttcactggtagaaaaacctgataacttattggaccaattactcaggttgtatgactactattagagggaacccattgtgaaaactttaaaccgtcgtgatttccccggcgcgcagtaccctgaccgtatcatccagtttggggaaggtaacttcctgcgcgcattcgttgactggcagatcgacctgctcaacgagcataccgacctgaatgcgggcatcgtggtcgtgcggcctatcgccacagattttccgccttcgctgaacacccaggatggcctgtacacgactattattcgcggcctgaacgagcagggcgaagcggtcagcgatgcgcgtcttatccgctcggtcaaccgggagatcagcgcttacgcagacttcgacgcttttttacgcctggcgcataacccggagatgcggtttgtcttctccaacaccaccgaggcgggcatcagctaccatgccggggatcggtttgacgacgcgccgccggtcagttatccggcgaaactgacccgtctgttgtttgagcgttatcagcatttcgccggtgcggccgacaagggatgggtgattattccctgcgagctgatcgattataacggcgaggcgctgcaggcgctggtgctgcgctatgctagcgaatgggaactgccgcaggcatttatcacctggctgacctcagcgaataccttctgttcgacgctggtggatcgcattgtgaccggctatccgcgtgatgaagtggcggctctcgaggcgcagaccggctataaagatgctttccttgataccgccgagcatttctacctgtttgtgatccaggggcctgcctcgctggcggccgagctgcgtctcgataaactgccgctgaatgtgcgtattgtggacgatattaagccgtataaagagcgcaaagtggcgatcctcaacggggcgcacaccgcgctggtgccggtggccttccaggccgggatcgacaccgtgggtgaggcgatgaacgatgcggagatttgcgcgtttgtcgaaaaagcgatttatgacgagattattccggtgctggatctgccgcgcgatgagctggtgtcattcgccagcgccgtgacagggcgcttccgtaatccctatattaaacatcagctgctctcgattgcgctcaacggcatgaccaagtaccgcacccgtattctgccgcagctgctggcggggcagaaagcgcatggcgcgctgccgccgcgtctgacctttgccctggcggcgctgatcgccttttaccggggagagcgggatggtgagagctatccagtacaggatgacgccgactggatatcgcgctatcaaacgctgtgggcccgccatcgcgatggccagatgagcactcgcgagctggtcaccgccgtgctcagcgtggcggatcactggcagcaggatctgagccagaccccggggttggtggagctggtgactgccgaccttgacgctatcctgacctgcggtatgcgcgacgccgtcaaacctctgtgctgatagtccatctatacacccggctgcggccgggttgtgcaggatctttattagttacaacatactattatactaacctgtaacagccggtcagtggctcctctgcatacggctttttagtgccaaatcgttccgaacagcaggagaattatggccgaagcgcttgaacaaatatctgcgcaggaaaataatgacctcaactcatatctcctgccaatattcgcaggctaatgcattcatctgtaaggaaactctcatggtcatcgatatccgggaagtacggccccacgacaaagccgaatggcttcagctttggcaaggctacactcgtttttacggtagcccgcagccggaagaggtgaccgaatgcacctggcagcggatgctggatgtaaactcgtctgtattgggtagagtcgcggtggtggatgatgcggtggtcggcttcgctatctgtgttcttcatgagggaacctgggttaccacgccgatctgctatctggaggatctgtttgtcgatcccgccttccgtggacaaggtattgccagaaccatgattaagtcgctgcaaagcgaaggggcggacaaaggctggtcgcggctgtactggcatacgcgccgtgataatcccgcccgtcatctgtatgatgagtttaccccagctgacgattacgtacgctacaggatcacgcttgggtcctgaagcggtaagaggttgttaagcttttcccgctataacaggggaaacaggctcaggagaagcaacgatggaaaaacgtcttgaaacagtggtcaatgtgattatgtttctttcgctattggcaacggcctgggatctctcgctggtgcatcatctcgcgtggtagtaaattatatcatctgaaacgcggcgcctcttgcggcgccgcctgtctcattcatccgccatcttccctgcgctaaaactccagtcctccagttggttaaactggataaccaccatcacgtcctgcgggctgaccgccatctcatcgtctaaacgtgcgcagagccgacgatagagtccttgtttctgcgcccggctgcgcggttttccagcaaaaatatgaaacaatacgaagtaatagctaaccgagatattttaaaccgggcagggtgcgagggaatataaaaaaagagtagagtcaatattactatcaaggccatcgttttataagtatattgaaaggccagatgatcataagaaatatgtgccggaacaatgaatgatctaataaaggaaggatctaattatgtattataggaatttcatcattccctcaatcgaggcggagcgtattctggccatgaaatttgatgaagcatttgctggagtaaaaaagaatgttattgatacactgaatcaaatgggaaatggtataacccgtgcttcgtattatacttcctgcttaatggataattatcaggatgtttgttctaagttaaagcaagaggacacaagatttattgcagggctggcgcagttagttaaaagccgtgatatcattttccaaatgattaaaatatatatagaaacctactttcaaaataaaaaagaagaaaaagctcaatatattctcaagaagcttgtcggcgcgggagtttacatatcatcttcaggattaactaatcgtattttaataatggcagtagcaaccatgatttgccagacttccaggtttaatactgttgtatatgggcgtatcaacagggcaaggtcattagtccttaaagggagtgtaactgctaccgcagtggtattaaacgtgtatggattgattcaggatgccgctaatagcgctgacaatttgaaaatgcataattcattttattacaatgcgttatacgctaaccatctggagatgatgtactttctcatcgaacctgtcatcacaggcgttccttatttaaatccgatgattatttctgatgatgaacttgctgaattacttattaaattaatgaggtgaatggatggatttcttgaaaagatggttaaaagaagaattcattctttttttatggggatggggtattgtattattaatcattatatttagcatgattgcagtctctctttttcctgacattgccattaacttaataggactttttgttttattaatcattgggtttcacgttgtcgtttggtttaaagttaaaaactgatatgaaagaggaggggtaatgtcaaatccagcatatttatggttaactgatgagaatgattcgcctattataggttcttgcctgatgcccacacgcacgggttccatcgaattgcgcgcagtgaatcatcatgtttggttacctaccgataataatacaggaaagctgacgggaacccgtcttcatacaccggttaaaattcaaaaagagtttgacagaacaacacctttgctatttagggctctttgtgaaggtcgaacattaagatcggcaacgctaaaaatgtacagaataaatgaggcgggactggaagttgaatattttaacatagcgatggcgaatattaagattacggcaatcacaccaaatttacatccggccggaatgacaagtactcaccttgaagacattgatttccgttatgagacgatcacctggatatacacagaagggaacatcatgtatcgtgattcatggaacgatcgctgttgtgcatggtagcaaatgatatagtgctgaaacgcggcgcctcttgcggcgccgcctgtctcattcatccgccatcttccctgcgctaaaactccagtcctctagttgattatactggataaccaccatcacgtcctgcgggctgaccgccatctcatcgtctaaccgcgcgcagagccgacgatagagtccctgtttctgcgcccggcagcgcggttttccggcgaaaatatgaaacagcacgaagcgggcgctgcgtccttcgctgaggtagtgcgggtcgtaaatgcgctgctcgtcggcggcccgttcgataaactgaaatctatctgctgacggaacgtcgaactccgccaccagacactcatgaaagagcgccgacaattgagcaaactccgcgggacgccaggctgtgccaagcgaaattcgggtcaggggcatgacgcctcctgcgcgttcaggcaggtcagggcgctggccgccgccggccaaccggcatagaacgccagatgggtaaacaattcgacaatttcttcccggctcaggccattctgatagccgaacgcgatgtgccacggcagctgttcagttttgccctgcaccgtcagggcggaaagggtgatcaggctgcgttcgcggggcgacagctcgctacgcgcccagatatcgccaaacagcaccgtttcggtaagctcggctagctttggcgcgatagcagccagcgttcggcgatcgacaggaggagtactcatagtgattctctttgcaggttaaaggagtcatcactgtcgcacgctgactaagatattgaatatcgcaacgttcgggattatcaatcctgtaaatcaggatggtatagccgatcctttacacctttcatcactccgcttttctgcccacctatcccaacggtcaggcggcgatctttcgcgccacgataaacagccgtgggaaacgcaggagcaccttcccgttacactgtaacggatagtgtgcggccagcaatgcgagatagcgtgtgagaaaggcgcttccggcctgctcgtccaggcctgccagataggggcgtaacccggtgccctgcagccagtcgacaatcgcctgatgagaagcaaggggatgaaaataggtggtgcgccagatatcaacttcgcaaccctggcggctgagcagatcgtaccaggcggcgggcgggagtaacggctggcgtccacggtccggcaaccccatctcgctggcaacctgacgcatcagggtatgggaaggttcctgccagttatccggcatctgcactgccagcgttccgttgtccgccagctggtttaccagatgggggaaaagcgtctcatgatccgtcagccactgcagagaggcgttggcatagatcacatctggcggttgcgcaggccgccagcgggcaatatcggcattaatgaattcgcagtcgggtaaggcctgcgccgcctggaccagcatggccggggagttatcgataccgacgatcgtcgccaacggccaggcggcgcgtagcaggcgggtgctgtttcccggcccgcagccgaggtcgacggcgtgctcgacctgcagatgggcaatacgcgagagcaggtcggccgcggggcgggtacgttcagcgtcaaattgcagatacaacgaaggattccagtcggccatcgggtgcagttcctgtgtgaggagggagacagggtaaagcatagaacgcgtcaggcggcatgtcagcggttaatgaacctcagcggtcacctttgtgcgtgacagtgtcacaaaatagaacgtggctggattgcgcctgcgctgttggccgaacctgggattgagacatggcaggaaacgtctctgcgcccgtggcgggcgcaggagcctattcggcgtttttgagcgcctcggcgcggctggcggtggcgtagacaaaatccagcatcggctcgagatcggtgtcatagccagcctgaataatttttcctcgcagccattcgatttcactggtgatatcgggaggaaaaatgttgttatcctgcgcccggcgcagccatttcagcagaaagttattctttcccctgataccacccgcttttttcgattttccgtgcatcttcagcgcgaccaggacgcagtaatagaaatgaacgcgctgattaaaactttggtgcatgtctgtgtttcccgccagaatcaggaattcaccgtgtgggtcagtgattcggattggactacggtaccgggctggatcgttgcgcgaactctgttgtctaccagtaccgtccatgcatctgttgccagacgctgacgggatgttggcacggaagccgaatcgtcgtcaattgccgattcattttttgccggcgtcatcggaccgcggcagcccgcgagccgggccacactactctctggcgacaagccgctgttgccgatgtacgcggaaaatcagcaggaatgcgagcgccaccacgatcgccgccagcagatacagcgtggcgagatcgtagaacccggcgacccagccggccagcggcccggtcaggcccagcgccagatcaagaaacgccgagtaggtgccgagggcggttccctgattttgctcttcaacctgttttaccgcctcaacccctaaggccggaaagaccagcgagaaacccgaaccggtgagaaaggcgccgacgccggccatccatgctgatggcgccagccagataagcagcaggccgagactttcgatgatgaagcaggccagggagaccgggactccgccaaagcgggtaatggtatttcccagcaccaggcgaacgcagataaagccgacgctgaacagcgaaagggtaaacgcggcgccctgccagctgtgcgcggcgaagtagagggtgataaaggtggcgataacgccgaaaccgacggtgccaaaggccagccccaggccgtaaggccagatttttcgcaccaccgcatgaaagggcgctctggcgccggcggtcaccttgacgtcctggcgggtacgagcgaacagcagaccgatggccgcgaccagcactaccaccgtagcaaagccgctgatgccaaaatagtgattgagggtaactcccagcggcgccccgaccgccatcgccacataggtcgccacgccgttccaggagataacccgtgacgtgtggatcgcgccgacggttttgatcccccacagggtggcgccggtggcggtaaagctctcgccgacgccgagaaacacccggcccgccagcagcgcggcaatggccagcatcggcgttgcctgcaggactaccgccagtagcgtgaaggcgccactgagcaggcagcagacgatcccaaggctgaccacttttttcggcccccagatatcggtatagcgcccggcgtgcggccggcttatcagcgtcgatatgtactgcagactgatcacaattccggccacaaaggtgctgtagcccagctgatagtgaatatagcccggcagtacggccagcggcagaccaatggagagatagcagatacaggtaaaaacaacgatcgaaataatgcgcaaattgagttgtgtagtgctgacggaagtgctcatagggataagaggttaatacaacgggatgtgtagcatagcgcgccgtgagggcgctggcgaggcgcgacagcgttttatcggtaaccgacgggaacgatatttgtacgaatgtaaataactgcttttacagcgcttaacgcccgcctcgctcagcgtcagctcgccgccatacccgacgaatcacacaccatgccccaggcgcggttttgcaataccgtgcggtagccgtcccggtcgacgaaagtgacgccattgacctcccagtaagggttaaacgccgtaacgcgcagaaatccggcggcgtccatggctgcgcactgtgcctcccatgccgcctgctgcggatagtacagcaccagcagatcttcatcgcctgccgagggggtgacgggatggtggcggcagtgggtgaattccagatgccagcccgcttcgggcgcgccgagcattatcccgctgaatccttcatgatcggtaaagctgccgagctgctcgagtcccagcccggcgcaatacatgctggcggtggtgtccagttcgctgaccggcctggcaatgcgcatatgacagaacgacataatgactcccgtgagcataagttgagttgatactgtaccggtaaatcggcccggcgtgtgttaagccgtgcccaggcgccaccttctctctgtaaataccatagcggactaacatccgccttgcgccaacattacctcttaatcataataaaaaaagaattatacaatattattgttcttaaattgagaatcactgtggggtggtggatgaataaccaatcgcgccaggccttatggctggcactggctggatcgatagtactgatgatcggcatgggctacgggcgctttgccttcaccggcgtgctgccgcttatgcttaatgaaggtctgttaaccctgcacgagggcaatctcgccgcgtcggccaattacgctggctatctggtcggtgcgttgctgctggcgcgggtgcagcctggggccgccacccgactgagtattatctccgccgggttgaccatcgccagcctggcgctgctggcctgggtgagctcgccgtggaccattattacgctgcgcgccgtcgccggcgcgctgagcgcgataacgctaattgcaggttcgctgtggctgctggaacatatggggcatcatcacggggcgccgttgctgtatgccggggtggggctggggatatttatctccgcggaggggatcgcccttggacatgccctgagcctcaccagccagcagatctggctgctcagcgcattatgcgccggtctgctgctggcgctggcgatccgttggctactgactccgccggctgcactggtgagggtttcccatgttgagacctccctgcctgcgtccgggagcgatacccgtcgcgcggcgtggcgactcttgatggtttacggtctggcgggcttcggctatatcatcaccgccacttatctgccgttgtttctgtccggttcgctgcagagcgttgacccggtccatctgtgggcgctgtttggtctggcggccgcgccgtcctgcctcatctggcataagctggtgctaaagtggggataccggcaagcgctgacccgcaacctgctcgtccaggcgcttggcgtgatccttccagcctgcagcgcttcattgctgttttgcgtgctaagcgcgcttttggtgggctttacctttatgggcaccgtaaccattgcgctaccgaaggcgaaaagtctcagccatcaggtgagcttcaatatgattgccgcgatgactgcactgtacggtgtgggacagattgccgggccgcttatcgccggcgcgctgtatcagatcgcggcttcatttaacccggcgctctatgccgcggcgctggcgctgctgattgccgcagggctggtctttaccgaacgccaggcttagccaatcgccacgctttgcagcagcttgcgccactcgctcagggcgggggcgctcaagccgctgcgccagataagctgggtggtcgcctcgcacagcggttcgctaaggcagttttcgggaagcgtcatcagcgacagcacgctctgcggcagcaggcaggcgtagcgcccggacgccacgcaggcaagcatgctgtgataggaattgacctcatgcacctcgacggccgcctgctgttccgccagccagcgttctcccagcgcgcggtagctgcagccgctggcaaatgccgcgaaccgcagcggacccggggtctgcggacggaccagcatcagggtttcataaaacaccggggtgaatgccagctcgtcgggacaggcaggttgcccatcggcccctggcggcaggcagaccagcgcggcatcaagggcggcggttaacaccccctcggttaactggctggttggttgggtgatgagggtgatatccacctgcgggcactgctgttggaagcgggtaagcagcggcggcagccggctggcggcggtcgcctccatcgcgcccagacgcagactgccgcctggggttgtcggatgcagagcctgctttgcctcttccgccaggctcaggatccgccgggcatagctgagaaactgcacgcctgccggggacaacaccatttttttgttgccgcgaacgaagagctcaacggcaagctcctcttccagctgctgaatgcgggtcgtgatattggactgtgcgcggcccagccgttttgctgcctgggtgacgctctgcgtttctgccacctgaatgaagatctcgagtgtgctgtggttcatatttttcttctcaatacgataataatgttgatcttaccatctttaaaggagatggtaagcctccggcatcgttaatgcatgaggaaaccatgagcaacccgctgctttcgcttcttgatattgattatcccctgattcaggccccgatggcgggcgtctccacccccgcgctggctgccgcggtaagtaatgccggcgcgctgggctcgctggggctgggcgcttcaaccgttgcccaggcggaagcgatgatagtcgccacccgccagctgacggaccgtccgttcaatgtcaatctgttctgccatgcgccgccccggcgcgacgcccggcgggaagccgactgggcaacaacattacgtccccattttgcccgctatggcagtacgccaccggattcgttaagcgagatctaccagacatttatcggtcatgcgccgatgctggagctgcttctcgacctgtcgccggcggtggtgagctttcattttggtcttcctgaaggtgagacgatccagcgtctgcggcggcaggggatcgttaccctggcgacagcgacttcgctccaggaggcgctgctgattgaacagcaggggatcgacgtggtggtcgctcagggctatgaggcgggtgggcaccgggggatctttgctccgcaggcgcctgacgcgcagctgagcaccttcaccctggtgcaacttctgcggcgtcgactaaccatcccggtggtggccgccggaggcatcatggacggagcggggatcgccagcgtgatgcagttgggggcgcagggcgtacagctcggtacggcgtttttactgtgtccggaatcggccgccgacgccggctaccgcgcggcgatccacaacagtcttgacgggcgtacggtgctgacctccgcgatatccgggcgtccggcacgctgtctggcgaatgccttctgtgcgctgggggaaggctatccggcgagcgccgtgccggattatccgctggcgtatgatatcggcaaagcgctggccgccgccgcgaaagcccagggcgtccatgagtatggcgcccactgggccgggcagggggtggggttgatccgcgagtgtgacgccgccactctgatccgccagctggcggcagagagcggctggaactaatgactgacggctagcggcggtgggccaggctacgcaccagccgatcgccggccatttgcaccccctggaccatcgccaccaggatcagcactgtgccaaacatgacttcattattaaaccgctgatagccgtagcggatggcgaggtcgccgagtccaccgccgccgatcacaccggccatggaggagaaaccaatcagcatcacgatggtcagcgtgatcccggccagcagcgttggcagggcttccggcagcagggatttaaaaatcacgtgccagacgttgccgcccatcgacagaatggcttcaattctcccgtagtccacctcgtcgagcgcgttttccgtcagacgggcaaagaacggaaaggcgccgatggttaccggcacgatggcggcggtgctgcccagcgtggtgccgacgatcagccgggtaaaggggatcagggcgatcagcagtacgataaacggcagcgacctgccgatgttgatcaccgcgcctaacagcgcgttcagtttcggcatcggcgccagcccgttggcgcgggaaataaacaacagcacgccggtgggcagcccgatcagcaccgtaaacagggccgccaggcccaccatatagagcgtatccagcgtgccgtcgagtaataacggccacaaatcttcccagctcatgctactccgcataatggcctcccctgaacgccgtggcgggtaagaaattcctgttcagcctgcgggtcgtgcagcagcgactggcgcagccgcgaccatggggtcaccagcaggtcggcaagtttaccgctttcgacaatctcgccctgttccagcagcgccgcgtggtcacagatggttttcaccacctccagctggtgcgtaatcagcacaatggtcagattgaggcgctggttaatatccgccagcagggccagcaccgaggcggtggtctcgggatccagcgcactggtcgcctcatcgcacagcagcacttccggccgggcggccagcgcccgggcgatgccgacgcgctgcttttgcccgccggaaagctgtgacgggaaagcggcggccttttcgctgagatccaccagcgccagcagttcgcgcacccgggcctcgcgagcggccctcggcactccggcaatctccagcggcaccgcgacgttgtcagcgacggtgcgggcatgcagcagattgaagtgctggaaaatcatcccggtgcgcaggcgataatcccgcagcgccgccttgttcaactgggtaatatcctgtccgttcaccagaatgcggcccgaggtgggccgctccagtaaattgagacagcggatgagcgtacttttgccggcgccactgcgcccgagaatgccgtatattgcccctttcggtatctgcaacgcgatatcgttcagcgccggtcggccggttccggcgtaggttttgctcagcccttcgatggttatcatgactgaggggccaccgggatcaccgagccgttgtaggttttacggataaactccgccacctgcggcgaggtcagatctttcgccagcgccttaatgcgcgggtcattcgccagggctggggtggtcaccagaatattggcgtacgggttatgctcggcgctttccagccccagggcatccttcgctggcaccaggccggcttccagcgcgtagttaccgttaatcaccgccaggtcgacatcgtcgagggagcgcgggatctgcggcgattcaatctccagaatcttcaggtgtttcgggttctcgacaatatccttcggcgtcgccagggtggtggccgggtcggtaaatttagggtccagcttaataagcttctgcgcctgcagcaggaacagcgcccggctcaggttggtggtgttattcggcaccgccacggtggcgttttccggcagtgatgagaaatctttatgcttatgcgagtaaattcccagcggctcaatatgcacggtggccgcgacggcaaaggttttacccagcgctttttcctgatccttcagatagggaacatgctggaagtagttggcatccacatcgccactggccagcagttcattggcgttgaccccgctggtcagctccaccaccttcagatcgaggctgggatcgatttttttgatgtagttgaggatctccgcgtggggaaccgggtccgcggcgacgcgcagcgcggcagcctgggcagacgtccatgccagagaaagagacagtgcgacccctgccagtttaaaagcggcatatttcatggtgtgttcctttttagttatggttaaacgatcaattgctcggcgcgttcgcgaaacacgtcctgatagtagcgttccgccacgtccggatgggaacgcagacggcccttgagataattccagccgacatcgcgcagcagcggattgtgcggatcgctgtccggccctcgcgcttcacgcgccagctcgggcggcagggtgtaaaccggcaccaccgcgtcaagctgggcgccgaggaagaaggcgatggagaggcgctgctgctgcgccggcggcgacaccacgcgatggacggtagcgcgcaaatacccgttggtcgccagctccagcagttcgccaatattgaccacaaagctgccggccagcggcacggcgtcgatccattctccaggcgcgacctcaacctgcagtcctttctgctcgtcctgcagcaggaagctgagaaaccccgaatctttatgggcgccgacgccctggctgctttgggtctcctgctggccggggtagcggatcagtttgatatgctcgttgggtttctcgccgtagagctgatcgaaagcattctccgggagctgcagtgcttcggcaaaggcgcgcagcaggcggatgcccacctgggtcatttgctgttgccagtgaagtaataccggtttaagcgacggcagggcggcaggccacagattcggaccctgcaggcgctgccagcgcggggcgtcgtcgctgagggtcagcgccggacgttcggcgccgatatcaaactgttctcgccagtcaggctggccgcgcgtcagctcagaggccgcgcggttatagccgcgaaaatggggggagtggatcatcgccacctgctgtttttgcgcctcatcgagagcaaaaaagcgctgggactggcgctgaacttcatattgaagcgcgtcgtcgacaccgtggttgatcaaatagaagaagccgatgtcgcgggcggcatgacgcaggtcggccaggaaggccgctttatccgcggggtccgcgtagcgggccaggtcgagaatcggcagggtggtcgcgttcattgtgttctccgaaaacggggtaataagttatgggttgattcaggttcagggttcgggcacaacagcagcgcatggtgatttcctctgtccggggctgaacacagcttgcctcaaggccaaataagcaaccaataacgttattttctaatttatgaccgcgcggggttcagtgcttttgcgttaaatagatataggcgcgaagcgcgtaatgaagccggttgcgcccgtcggtgagagccagtaaggtaggcgcactttttaatgcggaacggacgtatcgtaatgcacagctcgaaagatcccctgcacggcgtgacgctggaagcgctgctcaatgccctggtggcgcgctatggttgggcggaaatggcccgccaggtcaacattaactgctttaaaagcgatcccagcattaagtccagcctcaaatttctccgccggacgccgtgggcgcgcaaagaggtggaggctatgtatctcgcctcccttgatgatgacgcgccggtggagaaagcggatccctgggcaaactggcagaaaaaataacccttaccacaggacaccatcatgcagagctggagcagtaaagatttcaccgccgactgcgcgtggggcgcgctggatattgccaattttcccggcaccaccgtgcgtctgcactggaccgaccaaccctatatctggcacatcaatgatggtcaggaggtgtttgccgtgatggatggtcaggtggcgatgcatgtgaaagtcgacggcgaggagcaggttatcatgctaaacgccggcgatatcttctacgccggggtgggatgcgagcatgtcgcccacccgcagggggcggcgcgtattctggtgattgagaaagaagggtcggtctgaccccgcggcgggcggttctttgcccgccgtttcatcgcccgtcagatgcgacataccgcgttgatataaattacctatcctgctttcgatatatttaattcttgtttgccaatcccatcatcccggcactatcttttgccgcagacgcctgaccaggcacaaccgcgggagagatcatggcaaccttacagtgggaccacgccgtacagtttgtgaatcagccggaagcggcgattgaaatctttgccgggcagcagctgcgggcggtggccggagggcggcatccggggtggggaacccgtaatgcgctgagctattttggcctgacgtatatcgaattcctcgccattgccgacccggacgaactgcgcgccgcgacggacaaattcctcctttcgcgcgacgccgcacggctgctgccggagaatgaggcgctgtttcgggtggcgctgcgcagcgacgacatcgacgccacccatgaccagttgcgtcgcacaggggtgacagtgtcaccgattgtcgatggccagcgcaacgatccgcagggcaatatcatccgctggcggatcttcaccatcgatggcgacactgccgggctggtctatccctttgtgctgcagtggggagaagacgacgccacccggctgacgcggctgcgcgcccagaggctggacgcgccgcatccgctgggcgacattacgcttgagcaggcggtgttcgaggtggtcaatccgcaggcggtgcgcgatcgctggcaggcgctgctgggctttccgccactgggggagcagggactggacgtgggcggccagcaatttatcttccgtgaaggggctgccaaccagctgaccgaactggtgttccgcgtcgccaacccggcgcttaaggggcagcgctttcgtgtcggcaacggcgtgtatcgctttacataaaggctgactctagcgtgccgtggcgcgcagggcccccggcggctggccggtgatgcgtttgaaagcccggctgaaggccgccagcgactgatacccgaggctgaaggcgactttttccagcgcctggccttcatgggtgatgtactgcaccgccagccgcatacgcagctcggtgagatagcgggcgggggtggtgccggtggcggcgagaaaacgttccgcgaacagcgaacgtgaaagacccgcctcccgcgccagatcttccactttccagttgaaccccgggcgctgatgcatggcgtagatcgctttcgccagccggggatcgcgcaggacctgtacccagccggtggcgttgccgcacccgcacgctacccagccgcggacaatcagcgcggccaccacgtccgccagccgggcgaggatcccggcatagcctgcctggcgggtgagcgattcccgctccatcgctaccaacagcggctggatctccggccaggtgtttagcaggctgctgacccgcatcacctcgggcatggccttgaccagcggctgcatgccgccgagctcaaagtccatacaaccgctgaaaatgacggcgcgctccgggcagtcaggctggtcgccagcgttgatacaacttaccgtgctgcacaccgtttcgctgggcagctgcgccacattgaccaccgtggcctgcggatctgagagcagggcgtgcccgtcgccgttaggaataaatagcgcatcgccgctctcgagggtgaactgttctccgctggccatgcgcagcagcaccggcccgcggctgatgaaatggaactgggctttacccgccacggcgctaaagccgacgccgaacgggcgtgcggtttcgatgcgccggtagttaacgccggagaggcgcataccgcgcaacagttcgctggtcaggtcgatggcaggctggctcatggtaattccggacgaataatcaataactgaagagtatgcatcatatatcgtccgaaagtaagtccctaagatgaccaggatgttaataaacctggagagttgtatatgagttcctgcatagctgctgacgagagcctgtctcccgccaaacctgcctggcgcgccgtctatgccctggccctcggggtgttcggcctgatcgtggccgagtttctgcccgccagcctgttaacgccgatggccagcagcctcggcgtcagtgaagggatggccggacaggcggtcaccgcgacggcgctggtggcgttagttaccggcctgctgatcgccaccgccacccgcaatatcgatcgccgctgggtgctgatgttcttttccgtactgcagatagtctccagcctgatggtcgcttttgccgattcgctggcgtttctcctgctgggccgtctgctgttggggatcgccatcggcggcttctgggcgatgtccaccgccacggcgatgcgtctggtgccggcggcccatgtgccaaaggcgctggcgatcatcttttccgcggtgtctgtcgccacggtggtggccgcgccgctcggcagctacctcggggagctgatcggctggcgcaacgtgtttattctctgtgcgatacccagcctgctggcgctgctctggcagctgtgggtgctgccttccatgcgcccggagagcgtcgggaccttctccacgctgttcagggtgctgcgccgtcccggtatgctgggcggcatgctggcgacgatcctgattttcagcggccatttcgccttctttacctacctgcggccgttccttgagaccgtcgcgcaggccagtgtcgaaggggtttcgctgatattgctcggcttcggtatcgctaactttatcggcacttcggtggcgagctatctgctgaaccgtagcctgcgtctcaccctggcgctggtgccgttgatgatgagcgttctggcgctgctgatggtgacgtttggccatctgaccgtgctggccgggctgctggtcgccctgtggggatttgccttcggcctggtgccggtggcctggtccacctggcttgccactaccgtgccggatgaagcagaaagcgcgggcggtctgctggtcgcctctattcagctggccatcagcgccggggccgccggcggcggggcggtgtttgatttgcacggcgccagcggcgtcttcaccggcagcggtctgctgctgttgagcgcgatggtgattgtcttcgccgccgtacgggtgaaaccggtcgcccgcgccgaccagccggtgacgggccgcttatcccgcgagatcgataactaaattggccgacaggctgcgggagcagcacagcgcaatatgctgctctgcggcctgtttttccgcctccgactgcacggtatcccggtggtcgacggttccctcgcgtaccggcgtcaggcaggcgccgcagatccccatctcgcaggagagcggcaccgcgacgccatgttcctgcagcacctgggcgatggttttgtcccccggcaccggccagcgctccccggtggaggcgagggtgatggtgaaggttccgtccgccgccgacgccgccgtcggggcgggcggctggaatgcttcgctgtgcaattgttcctctccccatccgaccgcccgcgcggtatcgcgaacccgggccataaatccgggcggaccgcagaagtagacccgggtgtcggcgtccggagcccccagatcctgcgccagccgctggcgcggactctgcccctcgtctgagcagtggatctggcagattccacccgctagctggcgggcgatctcggtggcgaaggcggcctcctgcgcacggctaacgtaatagtgcagcgtaaagctggcgccggacgccgcccgggcgtgggccatcgccagcagcggcgtaatgccgatcccggcggcgagaagcaccacatggccgccctcgtgcagcggaaagtggttgcgcggggcagagatcatcaatggctgtcccgggcgcagggtgtcatgaatataacgggagccaccgcgagactgcgactcgcgggcgatgcagagcagatagcgatcccgttcggccgggctgccggtcagggagtactgacggatcagcccgcagggaagatggagatcgatatgggcgccgggcgtccacgccggcagcggttgcccctcggcgctcaccagacgaacggccagatttttcgcgccctggcgccacaggccatcgaccaccaccgggagtatgtcgcgcatatgacctccactcataccagaaagaaatcgccaaaacccatcttcttcagcccgcgccggtaggcgatagagctacggtctgccggaatatgcgcctccagggtcagatccagcggcaaccgttccggacgctgggtctcgaccatcaggcggtcctcttcaaatacccgcaggttgaacgcatgtacgtcttccaccggcacgtgcagatcgaagttgcgggcaataggggcaaacatccgcgtcacccgggacgacaccggcgaggcggcgttcatgatcaccagcctggcgtcggcgggaaaatggatggtcagcgtagcggtgaacggcagatgcatttcaaagtgacgcagccactggaatccttccggcgcgcggaaatcagagctggccgggtaattgcccaccgagctccagtagtcggcaacaaagccgaacggcgtctcctgcgggctatagtccggcacctgctggttgtccggatcggcgaaggtgtcggtgtggatccacgcgaagtgggcgacatcgagaaagccttcgacctggcggccggcaaatccctttacctcgaaggccgggcagttgatttgctgaaatcccgcgtcgtcccagtgcggcatggtcggtaacggcggcggattgtccggatcgcaggccaggcaggtccagatcagcccgtagcgctcctccacggcgaagctggtgagatgcagtttggccggaatgggttgccccggactggaggggatacggttgcagcggccatcctcgccaaagcgcaggccatgataggggcagacgatgccttcttcttcatgaaaccccagggtcagcggcaccccgcggtgcgggcagacgtcgcgggcgactaccacctggcctttaatacgatagataaccaactgttcgtccagcagggtggctttcaccggggcgccggcaatatcgcaggcgcgggccaccgggtgccagcagcgggccagccgcagccagtcttccgggtcaaaggtgcaatgggcggggggcgtgggggtgattgtcttcatgatttctcttcctgctcacatcggtgattgttttattgttgtgagattattgttgtcatattagggtgttcacatccatcaccattaattcactctgctgttgcaaaaaagagtacaggggcgccatgagtccattttcccgtttcgcgcactatttcatcgccgtggcccgctgcggcagtctgcgccgggccgccgagcagctgcatatctccgcctcggcaattaaccgccagatcctgcaggccgaggaggccttcggtaccccgctgttcgagcgcctgccggagggactgcggatgaccaccgccggtgaactgctgtatgacaatctgctgcgctggcagaaggaatttcgtcagacgcggcagaaattcgatgagctgcaggggatgaagcgcggaagcgttagcgttggcatggtgcaggcgctggcggaagggggcttcgccgccgcgctggcggagatcatcgccagctggccgtggctggagctggatctgcaggtggctgacagccacaccgtcagccagaaagtgcgtcaggcggacctggacgtcggcctgatcctcgatccgcaggggcaggctggactcagcgtgctggcctttgccgaactggaggttgggattgtgatgcgtccggaccatcccctggcgggggcgaaagcgctgtctttgggcgagctcagcctggagcggcatatcgtgcccggcgcgccgctgatcgtccatgagcgggtggcgctcctctatcgccaccatgactttgcgccggagaataccatcagctgcaatgatatccggcttatcaagtcgttggtgctacgcggcagcggcgtgacgctccttagcctgctcgacgtgctggacgaggtccagcgtggacagctggcctttgtcccgctgcgcagtacgctgttgcgaccgctgaccctggcgctgtgtactgcgccctcgcgtcagctttcgcggcccgcgcaaatggccattcagacgctgagtgcggtgatcgaatccatggcgacggtcagcccagcggcccgctgaggatggtgtcgcacatgccgttgataatgcgctccccggtctcctcacgcagctcctggtaccaggcttcggtgagctgcatatccttcccgtgggtaatatcgcaccgcttgcgcgccttcagcaccaggtcacgaacccggtcgcagcgctgggcttcatactcgcgcagggcggccgcaatatctcgggtctggcggaaaacggcgcccagcaccactgcatcttccatcgccgcgcagcctccctggccaatatccggggtggtgctgtgtccggcatcgccgagcagcgcgacgcggccgcgcaccaggcggctgaaaggttcgatatcatggatttcaatgcggttggtagtctgcgggtcgagggcggcgatcagcttctgcaccggcggcgcccagccggcaaagtagcggctgaggtcagcgcgcagggtgtcacgatcctccgccagacccgccggaagcggcacatcaaagaaaaagtagaaccggccggcggagaccggcatcagcgagacgcgcttgccttcgccgacaaaggtggtccactgatcgccgggggccagcgcttcatctatctccaccagaccgttccagttgacgtagccggcgtagcggcgctgcggggtaaagcccagcacccacggacgcagtgcggaatggctgccgtcggcggcaatcagcagatcgccgctggcgctgctgccgtcggtaaaccataccgtcacgccgtcggcgtcttcttcacagcgggtgacgcgtttgccgaactgcacgctgtcccgtccccagtaatccagcatttcccgctgcagttctgcccgggagaccgggcaggggcggctgccggtgcgttcgatcagcggggcgagactgaactgggtcatgttctcgccgctgcggaaatcacgatacgccatccggcgcagcggcccgccgaaggtctccatgatgtcgcccatgccgaggtgggccatgcacttcacgccgttgggccacacggaaatcgctgcgccgaccggtttgatctctttcaccgcttcatagacgtcgcagtcgatccccgactgtttgagcgccactgccgcgcttaaaccgccgatgccggcgccaatcacgattgctttcatttttttctccttctcccgatgttgtgactgactacagcaatttgcgtaccagttcgctggagggaggaaaaccgcctgcctgaggcacagcgatggctcatgacgcaccgcatcggtgcaatgtgaggtattggttgcctttttatgaatcaaaagtttctgtatgttgcattaagaatctatcgtttcaggcgcctggttcagcagcgaagaggagtgatgcatcacgagcgtaatctaagttgatgattttggagtgataataaatttattggtgcccttttgtcgtctctggcctgctttgtgcacaagcccatgcacttctctttactacgggatatcactatgtctgacgaacatcacagtggcctgctttacggccttgaacagcggatcccaccgcttccggcctttttcagcgctctccagcatgtgctggcgggcctggtggggatcatcacgccgccgctgatcatcggtgctaccctcgggcttggcgactggctgccgtatctcatcagtatgtcgctgctggcctcgggcattggcacttttctgcagtccaatcgggtatggggcatcggcgccgggatgatctgcatgcagggcaccagttttgccttcctcggcgtgacggtggccggagggatgtgggtaaaagcccagggcggcgggccgcaggatatgatggcgatgctgtttggcgttaactttgtcgccgctctggtgccggtgattgtcagccgctttatcgaaccgctgaagaaaatctttactcccatcattaccggcagcgtgattgcgctgatcggcatcagcctgatcaaggtcagcgtcatcaactggtgcggtggggaaaaggccgaggatttcgccagcatgagcaatatcgcgctcggggcgggcaccctcggggttatcgtcctgctgagctgcgccaaaaaccgctggctgcggctctcctcggtggtggtgggcattgccgtgggctgcatcgcagcggggctgagcggtcagttccatcttcacagcctgggcgacactctgtttcgcctgccgacgctgtttccgttcggctttcagtttaacagcgcgatatttctgccggtcgccctggtgtcgctggtctgtattctggaggcggtgggcgatctgacggccaactcgctgatttcgcaacagtctgttgacgatcgcgcttttcgtaaccggctgaagggcggtatcctggcggatggcgtcagctgtatggtggcggccatgctctgtgcttttccgaacaccaccttcgcgcagaacaacggcgtgatccagatgaccggggtggccagccgctatgtcggacgctacattggcgtgattctgatcctgctcgggctgttccccccggtgggcgaactgctgcggcagatcccggcgccggtgctggggggcgccacgatggtgatgtttggctgcgtggtggcggccgggatccggattattacccagaccccgctgagccgtcgcgatgtgctgatcgtggggctggcgtttggcgcgggtcttggcgtggagtcggtgccggcgtttctcagccattttccgccgatggtcggcgatctgttcggttcggcggccaccagcggtgggctggtagcgatagcgctgaaccttattctgccgcaggagcaggcggcgacgaaaacgataaggagtcaggatgatcgcgctgagtcagtttaacagcctgagtaaagatgaggcggcggggctgctggccccctgcgtggcgctcccggcctggggcgagacgctggtgagcttgcgacctttcgccagccgccatgcgctgctgcagaccgcccgggaggcgatggctaactggggagaggatgagctgaacgcggcgctcagcgcccatccgcggatcggtgagaagccgaccggcagccaggcgcatgcggcgctgtcgcgccaggagcagtcgtcggtggacagcgagaatgagcggctcgcgcaggccctgcgggagggcaatgcccgctacgaagcccgctttggccgtgtgtttttaatccgcgccaaagggcgcagcggcgaagagattctgcaggcgctgacgcgccggctgcagcataccgctgacgaagaagtggccgaggcgcttgcccagctgcgggaaattacgatgttaagactggaaggagcgattggcgaatgagcaccctgagcacccatattctggatatttccaccggcacgccggcggaaggcgtgacggtcagcctgagccgggagggcgagacgctggcgaacctggtgaccaatgcccaggggcgtatcgccacctttagcgccgcgccgttgccggcggggcgctattgcttaacagcggaaaccggggcgtggtttgcccgcgccgggcgcgagagcgtctttacccgggcgcagattgattttgttatcggcgaggcggcagaggaccatttccatctgccctttctcatcgccccgggcgggtggtcgacctaccgcggcagctaagcccgtctgcccgttgccgggcggcgctgcgcttgcccggcctggatcgttacggagcgggcagagacagcccgtaggcccggtaaggcgcagccgccaccgggcatgtacagatggctccggcgatcatccttcctgttttatccccacacaaggataattattctcctatccccaccaggggatatccttgacattatcccctatagggtataaaaccaagtttatcccgacagggggataaatgatggtgaggaacaaggcgatgaattccccgcagatatacagtcccgtgcagctggccaattacctgaagctgctgcgccagcagaaccactggacccaggatgcgctggccaggcgcatcggcattaagcaggccacgctgtccaattttgaaaatcaccccgacaaaaccaccttaaccacgctgtttaagatcctccagtcgctgggggtggtgatgacgctgaacgccaaagctgctgagacggcgccggctcccgataacaacacggaccttgactggtaatggcgacgcttaccacctggatgaacaatgtgcgcgtgggaaccttaacccgccaggctaacggggcgcacagttttcgctatgacgaagagtggctgcgcagcccgcgcgccagaccgctctccctctcactgccgctgcagtatggcaatatcactgccgacgcggtgtatcactattttgataacctgctgcccgacagcccgcaggtccgcgaccggatcgtcaggcgctatcaggcgcgctcgaagcagccgttcgatctgctggccgaagtcgggcgggatagcgtaggggcggtgaccctcctgccgccgggggaagaggcgcacctggaaggattacgctggcagacactggacgaggcgcagctcaccgctttgctgaccgcttaccagtcggatatccccctcgggatgattaccggccaggacgatttccgtatctcggtggccggcgcccaggagaaaacggcgctgctgcggatgggcgagcagtggtgtattccgcagggcgccacgccgaccacgcatatcattaagctgcccatcggcgagatcaagcagcccaatgcgacgctggatctgcgtgaaagcgtggataatgagtatctgtgcctggcgctggccagagaactgggcctggcggtgccggaagcggagatcatcgccaccccgcggatccgcgccctggcggtaacccgcttcgaccggcgctgggcgcaggagggacgggtgctgctgcgtctgccgcaggaggatctgtgtcaggcttttggtcttccttcagcgatgaaatatgagtctgacggcgggccgggtatcgccgcgatcatgacctttctgctgggctcgagtgaagcgctgaaagatcgctatgactttatgaagttcatggtcttccagtggctgacgggggcgacggacggtcacgcaaaaaacttctcaatttacctgttgcccggcggcagctaccgcttaacaccgttctacgacattatttcggcgtttccggtgctgggcggcacgggactgcatctgcgcgatctgaagctgtcgatggggctcaatgccacaaaagggcgtaaaacagagattaacgccatctatccgcgtcattttctggcgacggccaaagcggtgaactttccccgggagcagatgctggcgatcctccaggagtttgccgggcatgtgccgcaggcaatcgaaagcgctcgccggacgctgccggcggacttttccagccacgtctggcaggccattacagagaacatgctgaagctgcacgcccgcctgcagcaagggctgcaggcgctatagcagagccggctggcggctagctctgcggctgcccccagcggctgcgcaaatagttaaccgcctgccgggtttgcggctgattgaggttgttttcgcggaacaggatggtgccctggatctgcggcagagtctcattgagatcgagctgctttttcagctccggcacgccgccatccaccgtccagtcaggctcgtttttggacggttcacccaccttgtacagcgccacgccgatatacagccgggtatgggtcggtttaaccacctcggcccaccagttggccagcacatcatagcgcgcggcatcgcgggcaaacggccagtagatctgcggcgcgatgtagtcgagcagtccctgctgcacccagctgcgggtatcggcataggattcatcataggcggccgcgccccgggtatccgaccccgccggatcgtgcgagcggttgcgccacaccccggccgggctcacgccaaactcgacgttcggattgagctttttgatggtggtggaaacctgggctatgagctgctgggtgttatgccgccgccagtcgcccttcgaggcatagccctgcccgtaacggcggaaagtctcgttgtcgttaagcggggaagaggcggtttcggtatagaaatagtcgtcgaactgcacgccgtcaatcgggtagttctgcaccacttcagcgacgatgctggtgatccagtcacgcgcttcgggaatgcccggatcgagaacaaagcgatcgctggcggtgcggatccagttacggtgcaggacgaacacgctggccggtacctgagtaagggtgttgttcagctcggcaatcgtcgacggtttggtgttgaccgagacgcggtaggggttaaaccacgcgtgaaccttcatgccgcgcttgtgcgcttcatccagcataaactgcagcggatcgtagccagggtattcgccgattttgccggtcagcatatcggaccacggcagaatatccgaccgccagagcgccgtaccgtccggtttcacctggaaaaagacggtattgatccccaggcgctgcaggttatcgagtttagcgatcagcgccagcttctgctgcgtgatgcggctctgcggcgtgctggcgataatcgacccgaccggcggccagtcaaggcgcgaaacggtggtgagccacacgccgcgcaccggctcccggtgcgcctgcccggctttgacggcggcagcgttcggcggcgtgacaagggatttaggggctttactggtgcagctgaacagcatgccagcggcgatgagcgccgcgcctgccagcgccactttgctggctaaggggaatcgacgagaatggctgatgatgaactcccgtgtactcagatcgtcgcgtgtaggcgctattctcttacgattcgccggtcagagcaattccttcatccgcttcatccgtcggttcgccatcgcctagtcataatgcaaggtataggtcgcgacggccgacacctgaccggcggtgatccgggaacgtgtctggtagtagcgggcagtgagcggcagggtaaaccggcccgcgctcgcgctgcccagcgtcatctcatgattcagtacgaccggctgacgatggtaaagcaactgcacgccaataccctgcgcccgatcgtcggtggcgtcattgcgcagaacgccatgcccccgggcggagaggggctccgcgccgtcaactcgcagggaaatagtgaccgcgctgttgcaatccagctgcagcgcgaaaggggtgtcgccggtggttttgccgacgccgccgaagtggtcaagcatcgccgcagggagcttaatcagggctggcgtggcgtcattcactgaacatcccgcggtgctgatcctgccggttaagtctaacgcggccagcggggtatgctccgccattaaaaagcgctcgctgtgatactcaagctcgcccggcgtcgccgcgggaccggttttaatgagctcaatcgtcaggcggaaatagcccagtttccacaccgcatcgggcaaggcggcgggattgtccacccgttggctaaacggcgagggcgtcggccggtcaggaaagccgccatagccgccgatagcgcgcagcgatacgcgaacgccaatgccggcgaggttagtttgataaaccgtcggtcgcgtcactcccccggacagcagactgtccagcaacagcggtgacagcccgtgcggatcgtccgcgcagcggatccactgttcgccgccgtcgctaaggcggttccaggcgaaacttttatgatacagcggggtgccgggtctggcgtcagccggaaccgtgagctgccccacgttcagccgaagggtggaggcctggccgcggacaaacactggcgtacaggcccatccgctggcggccggtaacagagtgaataacagcgtcagggcgacccgacgcaggagagttaaaaaggacatgataacgtctgctgtaagatgagtggatggggggtctgcgccagcgtcggggtgagatcgtagcgggcgctacagcgctgctgagggcctggcccccattgcgcatacagggtgccttttggcgccaggccggccaggtacacctgaccctcgctggcaacgatgctgttggtgtctttgacgcgtacttcgctgccaaagggcagcggttgtcctcgcgactgcagcgtaaacagcgccttatagccaacgtgggtgtgaaagcgcgccagaaccaccgcgtctttggtagggaccagcgtcacggtgctgttggccagatccacattctccggcagcgaatggctatcgagagagacgtcgttgcggtgataggcggtggcgaagggcagcacggcgtacccgtcaccattggtggcgatggttttctggttggcgagggtcacacccccggcgccaccggcgtcaatcaggacgacagcgccattcatttccggcgtaaagactaccccgtggcggtgaatcagaatgcccccgctggcgccgtagttcagacgagcggcctgcgaatcgtggctgtagccgagattcagatcgccccttccactgctgtacccggccgtcaggctgccgctggacccgttttgccgatcgcgggtttggctgacggcgtagctaagcgcgtgattgtccagcaatgtgccgttgaggctgaccatctgactgccaacgctgtggcgggaggaggtcagggtatagccggcatagctccccggcagcaggtggctcaacggcacggaaagtgacaacgtcaccactttgtcggaatgcggctcgtcatcctcctcgtcaccgtggctgctgcgggagtcgctgtagctgagcgaccacgcgataccgtgaacctggctgctgatccccatattggcggtacgctgtgaggcgccccctgaccagtagctgtcctggtcgaggctcagatagagggtgatatcgtacggcaggctctggctggcggtgatttgcagggtcgtttttttgttgtcgttatcccgcgagtcggcgtcgggatccgggctggaatacgcctcgctcagcgtggcatagcgctgatgcgaataacgccagccggtgaaagtgaactgcgtgccaagacgatcaaaacctttgctgtactggagctgccaggcccggccatcgatcggatcctgctggtgccggtcgcgggcgtttaacagctgcagcgagagcgccccggcttctcccaacccctgtcctgcgccgagcgagaggttatggtattgcgccgcgctctgcagtccgccaaacagcgtcaggttatgggcgaacccgcgcatcagcgacagctgcatcatcaacggccgctggctggcatcgtcgctatggtagcgcccggcgaccaggttgtatttcaggctgccttcgcgctgcatgctggtcaccgaagcatacggctgggtgaagcggcggatttcgccatccgactctttgacggcaacctcaagattgccgctgctggcggtgggataaagatcgtcaatcacgaacgcgccgggggtgacgtaggtttgatacagcacgtagccattttgccgaaccgtgacctgggcgttggttctggcaatcccgcggatggtcggggcaaaacctttctgcgagtccgggagcattgcatcgctggaggcgagggatattccctgaaactgtaccgcgtcaaacacatcgcccgacgtgaaggtatccccgagggtcagttcactctgccagcgcgtcaggtcgcgctcaagccaggcgccgctggtcgtccactggggcttatcatcgctgttggcggtcaggctattgctggcgcgcaggcgccaggcgccgacgttcacgccgcttttcaacatcagatagttatcgcgctcggtgctgccctcgcgggtacgctggctggcgcctgaataacgatagttactctgaaaggcgctaataccttcgtcccacagcgcagagggaacattatccctcgcccggtgcgtcatcagcgcctgaggaatggtcattaccagccgctgatgagcaaaatcgaaattgaccgtgctgcccggcagcagtgcgttgagttcgggacatgagcgggacgttgcgccgggcgcctgggacagcacggccgggttaactccggcctgcagcagatcttccggcttaaggcagggcgtgagctgtccgcgatcgttctggcgaaacgtgacggtcttacgggcgtccagcgtgacgccgttgacctgccagctcaccggataggcgcctggcggctggcccgcctgctgattgaagcgttgcagatccactgccggcaaatggtcgtttttctccagcagatccatattaaaggtcgcctgggcgtgcaagagcgcgctctgtccgcccagcaggatggagaggctgacgacggtaacggtatgagccgggccgtggcgcatcgcgacatcagacgcttagtgcgccgaaacgggggcgctaaacgtctgcacagcgccaaagtcatccagaatgcgccagctcacctcgcgggcgcaggcctcgccggggagggaatactcttcacggctgtgaggagcaatcacgctgcgctcaagcggcgttttctggttctggcccgcgcagctgagcgtggtgatagtcacataatagggggaggcattctccgcctgcaggtggttgccgctgacccgccagcgcaggtgctgcgccgcgtcgagcgccgagccagggagccctgccgggcgataaatgagcttcagttgattctttatagcaaattgcagaatgttctcgccagccggcgcggtattggcgggaatcactttgatattcagggtgaataaactctcacggtcagagggcagttgcggcgaggttaataacacgcgcagatcgttgctgtctccggcatccagacggaacaatggcggggtgacgataaacggtgatttattattatcagccagatcgtctacccagctctgaataagcaccggatcgtgaggattggtgttttttaccgtgatgtctgcctcatggctttgttcattataaatgacacgagtgccggcaatggcaaccccggcggcagacgccaggaacgggcaaaagagaaggctcaggataaaagccgctttataacactgcataattgaggatccggtcacgaggaatgagaataagggcagggggacgctgcccttggaaaagtggcaatcaggacattctattcgtacacaatatcaatattggccgtggcattaatattgccggcggtgacatcctgtgaggaatcgctcttcagatcggcaataaagttaaatgcaatatcaccgttttcgtcggcttgcgaaaccgccgttttgctctgcttgtcaaaggtcagctgagtgccttccgttgagccgtcaggggaagagaagacttcaatgcccacccctttggcggtatccgcggcgtcagagagcgccagcacggcggcgctggtgccgttagcgttggtgtccggagtaccttccaggctgatactgatgttctgcgccagtgggcagccggtgaggttgatggtgaacggcgtttctgcggttttcgcttcatgggatttcagcgccgacatatcgacgttgccaaaatcgacattaacatcgccaccgttattggcgatctggcaggactcgttaataattttaccggtgaaattcagtgtacccgccgcgcgggcggtggtcacagtagccagacttaaggccagcagtgaaccaacaaccagcagggtgcctttttctttcatactcaaaccttattaaataatcacaagttaacaaaagcgtttaacatttttaaagcatgttttttatttctgttcacaaaaaaacggtaagcatcgctaatgtatattaccgtcgggggcgggattatacggagaacatcgtaaaggcccattgataagatgtgttaagctgtaacattatttattttttggtgtaagtataatctcattaaatattaaaaaagagtcccatacgtataatgcattatttccgggagataactgttctgagcaaattttacgaaaaagttgctgttattcccggcagttgaccgggtggcccggaataatcatttacgctgccgctattttgcagtagcgtggagtgacggcaggaagccgcaggttgtagggcacagaaacgatgctgtgccgcgcagtgtcacccgttatcaaggaagattgctatgtctccattccgtctcgctctgctatgtctgtgcctggcgccgctggcgtcgtctgctgcgctttccggcgaggttcatttttcaggacgggtcatcaatccggcctgtgttatcgccccccggcacgatcgtatcgatgtctcgtgccagcaccattcaccggaacaggtcgccttgacaaacaaccgtcctcgctacgccatgccggacaatcgtggtgaggtcagtattcactggcgaaatgcgcagcatagcgaagcggatgtcattattcgctatcgctaaggcgggataaaggcaatgaagagtaagctgatgcaaggaggtaaaggataaacccttgtgcggtttacgcgcgcatcagccataaccagcgggcagacgcgcgcgcagaaaatcattcatgaaaacaattattgccgccgcccggcggcagaatcaggtgtcgtctggcgcccaagcgagctccgggatcggaaagcggcccaccgtcatagagaaagggaagcaactcagcggatccgcgactgttcatcgtcgcgtaacgtcagcacctcaaaaccgttggcggtaacggccacggtgtgctcccattgcgcggagagttttttatcgcgggtaaccaccgtccagccatcttttttggttttgatacggctgtcgccctggttgaccatcggttcaatggtgaacaccatcccttcctgcagcacggcgccttctccggggcggccgtaatgcagcacctgcggttcctcatgcatttcccgaccgacgccgtgaccgcaatattctctgaccacgctatagccatgttcctccacccagcgctgaatagcgtggccaatatcgcccagcgtcgcgccaggcttcaccacctcaatgcctttccacatcccttcataggtagtctttaccagccggcgggccagcggggagacatcgcctatcaggtacatcttactggagtcggcaatcatgcccgctttctcgagggtgatatcgacgttaacaatcatcccggagcgcagatgttcggtcgctttggggatcccgtggcacaccacatcgttaatggaagtgttcaacacatagggaaaatcgtattgccccttgctggccgggcgggcgtgcagctggttgacgataaaatcttccactcgatcgttaatcgccatcgtcgttacgccgggaacgataaaagtatccagcatatcaaacactgacgccagcagctggccggcatggcgctgccgggcgagttcgtcggcggttttaatgattattgatggcattgatcacctccagcagacggtcagagccggatttcagcatcagcagtttgatctgctggtggttaagctcagggtagagttcgctcatcatgcccagacggatccagtattccgcctgggcattgacggagcgggacatggctttgctggcatcacgaatatcatcgtgcagcagatcggagattttgacgattcccatagatatataccgtaatgattcgtatatacatcgtatacaatccagcgcgggatgtccttggcattttgtggcgtagatggcgagcaccatgcaaaaaagcccgaccagcgggcttatattcagcattttttcgggttaaaaattcgcgctgtgcaccattgcgaaaattacccattagattatcggtatgcagaaagaaaataacatgatggcgacgcatcaatatattttatgcaggtgttaattttgcgtattaatattctcccgtcaggccgggaatccgaaggatttacagcgcgtcagtgagtttatccaccaccactttacccgcattatcgaactgcgtaatgcggaaactgtcgctccaggagcggcgggtggtgaagcggtcgaacagggatacccggcctttgcgctggccatctttacttaaaataacccattcggtcaccgaagaataatgctggctattgtcatgccgactctgttgttcaacaagctggtcttctttttccacttttaaataatcacgcaacatatttaacctccatagaaagtattattaacattactccttttatttattctttcaatcaaactttttaatcaataaaagtaactattagtgggcgacctaagtgcaaaaatcgcggggaatatcactccttcggacggcctggtccactacgcttaacgagagcgtccgccgcgcctactgcggtgtccgggtcagaaagaggccaacaaaaggctatctccttgtattcttaataggcgtaattctgctatatctaatgcgttttgccacgaccgagccacagagagcgctgtaccatgagtaacgatcacctgacggatattgcctatcgccactttattgaaagcgttaaagattatgccatctatatgctgagcgccgacggcacggtcattagctggaatgagggcgcccgccgggcaaaagggtacctgagcgacgagatcatcggtcgctacttcggtctcttctatagcgaagctgagcaactctccggtgtacccgcaaaaaacctggaaatcgccctgcgtagcgggcagtttgaaggggaaggctggcggtatcgcaaagacgggtcccgattctgggcgcatgtcatgatagatactatccgcgatgagcagaacaccctgctgggttttgccaaaattacccgcgacattagtgaacagaaggcgattaacgaccgcatcgcctggatggcgcgctacgatgcgttaaccggtttacccaatcgggtggagttttttgaacgggtggagaagctgatcactggaaatgatgcccgccgctttgccattttcacgatcgatttagacaaatttaaagagattaacgatctgcagggccatctgattggtgaccagctgctgcagcgcgtggcgggcgccgtgctcaaaacgctgcagaaggaggagatggtcgcccgcttcggcggcgatgagtttgtggccgttaaacctttttcagatgagggtgaagtggatgcctttgctgcgcgcctgtggcactgcttcagcggtaagcagacgtttgctgcgacggaagtggtgctctccgccagcattggcatctcagtctacccggaggacggcacggatattaatacgatactgagcaattccgatctggctatgtatcgggcaaaaagcagcctcgaccataagatttgctggtatgaacgtgaaatggatgacaagacgcggcagcgcaatatgatggccgccgatatccggcgcggtattcacgccggggagttttcgctccactatcaggctatccgcaacatcaaagatcgtagcatcaccggttacgaggcgctgctgcgctggcagcatccgcagctggggacgatcccgccggacgtgtttattcccatcgccgaagagagcggcgctatcgtgcccttaggttactgggtgctcgagcaggtgtgtaacgaatcgctggaaaatggtttgaacagaaaagtttcggtcaatatctctccggtgcagttgcgccatcgtagctttatcgaaaaagtccgcgagatcctgatgcgtaccgcctacccggtcagtctgctggagtttgaggtcaccgaaacggcgtttgtgatcaataaacagctggcgttcagcgttctgcatcatctgcaaaaaatggggatcagtattgcgctggatgactttggcaccggttactcctccctgagcatgctgcgcgattttcatttcgacgtcatcaaactcgaccgcagctttatgacagatgtggagagcaaccctcaggtacgctcattcgtgcgagccattatttcgctgggcaattcgatcaatacgccgcttatcgccgagggggtggaaacggctggacaactgcagatcctcgaagaggagggatgtgacgagatgcagggatttctgttcggcgagccggtcgatatcaaacacctgcccgaccggcgctgatgcgcccaccctccgctggtgggcgtaagggcgttactgatgcgcaagcgctgcctgcccggaaagatgcagcagcgccgagcgcagcgagacctcgaacatctgaccgtgcgtcaggccggggtagcgccagaaggctacggtcaaccctttactggccagctgctgttgggtttgacgcaacacctcaagcgaggcctcgtgcccggacggctctccacgggcttttccatcaccctcgagtaggtacagcgatttcccgcgaaagcggacggcatcaagactttggcttgcctgcaaaggcgattgcagggcctgacctagcgacgggctggcggaatagtagatcccgaacggcgaagccttcctccacgcgtcgagcacaaacaatccgccgtaggagtggccccagatagcgcgctgatggggatctattttcaggttagcttccgtctggggaaccatcgtttcggtcagcagctggcgaaaagcatcattgccgccggttttacgcggcggtagcgcgggtttcccggcgcgaggctcatgcgtctttagcggtggggtgtaatcccaggcgcgggctgcggtatcaaagggcagcgcggtctggtagccgatagcgacgatcaccggcggggagccggcgaagagctgctgcagaaacgcgtcgtcgagtttatccatcaccgcgttgccatccaacatatacagtaccggatagccggcggcgggcggggctttgtccggcactgcggtccatacccggtagtgacgttcgccatcggcagagtcatactggcgttgcgtaaagtggtaaaacgccgaccctttatccgcaatgttcggccccagcggctgaagatccggccgggcaatactgccgctgctgtagaagagtgcgccaatcgccagcgtcagcagcccgctcgtacgacctgttgtgatgctccctgaactcaacttcacctcgtctgtccccctgttttgttgcttctggcgttattgttgggctgacacgttagcacagcttttatgataatggttctcatttctttttctggcgttgccacaaactgtatgctgggggagcgggtgacgggataaacggagatgacgaagagaaggccccctgtaggcggtcataaaagaaaattcaggaacgatcgtgaaggtgactcaacagttttttgaccagcggagtgagcgcaataaacagcagcgcaataattacgatcagcaagagcgtcagccctttatggtggctgataagcaccaacagcatcgccagcgtcatggtatgatcctttaataaatggcgttaaccaccgccaaggtgaataaaattcaacagaatggtcatgaccacccaggccagcagcagatagcgtcgtttatcgcgtcgagcttccagcgcagcaaaatagttagcgctgtaccaggttgatatgataatagccagcgtgatgatgacctgccagatcgcctcgctgaaaccggtgacgatgcttatgccacgaaagcagaggacaatcgcaataccgttaaacgcattacacatcagccatccccacagacttgcgggtcggctaaataaatatcccaatcgtaaaaccaatgtcgtattcaccctgctaaaataatcgcgctgtaaaatgcattttaacgatcgaacaggtattgatataaatcaaaactaatggaataccgcaggaatcactggcgtacggtgctaacagcgcgagcaataaacctgagggttagtagctctgaagaatatttaactcattgttttaatgggattttagttatgaaatgcctgcgctaatgcgcgtacttcaagcaagtagcaatacgttggtttctctggttattattgccattgaggttataacggggagaatcagattattcgccatgtttgctgggcgaggggtgaaaatccgaccggggccagagctccggtcggtgtcatacttaatggggcaaggcgttatgctgcagaattttcaggaaatcatgtttgtcagagattaatgacagtgcattagcgatcagctcatcgctaaatatcgaggcaatttccttgagtacgtcaatatgctctttctctttcgcgatcacgccgatggcaataaacattacattgctccgatcccagattacgccatcaggaaactgatagatctcaatcccggttttaaggatgatatccgtcgcggatttcggcaaatgcggcagggtgatgccattgcctaaaaaggtcgagacctgatgttcacgctccagcagaaagtggacacattcctgattgacatagcctttggctttaaactccgcgccgatcatggcgatgacttccgctttattactggctttgcagccaatatgcagattatccagcgtgatgttatcgatcataaccaacctccctggtgagacgagtggattttttatcttcatggtttgctgacagctctgcttctaactgctcaagcgatttattggaggtctcgggcagggcaaagaccacgaaaagaatggctaaatagttaatggcggcgaagataaagaagaccggcccaaggcccagttttgcctgcagcagcgggaacagatagctgaccaccgcgttcatgatccacatgaaaaataccgagatccccatcgacagtccgcggaatttcagcgggaacagttcggctaataccacccaggtaataaagcccatggagccctgcatcacgccgacgaacagcgcgcccagcagccagatggcggtagctttcaggtcacccaccagggtgtaatcgacagcggcgataatcagatgcagggttgccataatggcgaaaccgtagatgatgattgtcttacgtttgaagcggtcgacaaggaacagtaccccgatcagcataccgcccacggagaaaacaccgttcagcacgttgcagatcagcgaagtacgctctgagaaaccggcggcactcaggatttccgtaccgtaatacataatgacgttaacgccggtggtttgctgcagtgcggcccaggtaatgccgaccagcaaaattttgaggatccagggtgttttgacaatcgtcgcaaaggtgctctgggcgctgtacttattaccagcttcaattttgatcagggtagagatgtcatcgtactccttctgcgcgcgttccgccgggcggatttgtttgaggatatgcagcgcttcatcatgacgatttttgctgatcagccagcgcgggctttccggcgcgcgccacatgccaacgaacaggcagatggccggaatcgcttgtaccagcagcatatagcgccagacgtccggcagatggccccagatgatgccaatgatcgcgttgatggcaaacgccgccagctggccaatgacgatggcgacttcattcaggccggtcagcttgccgcgcatctcggtaggcgccacttctgaaataaaagtgggggcggtgaccgaagcgccgccgacggcatagcccagcagggcgcgggcaatcagcagggtagtgatatcgggggccgcggcggaaagcaacgcgccgatgagaaaaacaaaggagagaaagagtaaatatttacgccggccgaagtaatcggcaaatttgccgccaaacacgctgcccagcgcggcgccgaccagcagaacgctcattaccagcccttcggtggttggggtcagcgccatgtactgcttcagtgaggaaaaggcgccgttgataacgccggtgtcgtaaccgaaaagcaggccgccgaaggtggccactaaggtgatctgatgaagtcgttttctctgttgctggttcaggtttgttataaatgacatggtagtccctttattttgttgaacgacacaagataaaaatacatctccccagtcaggatttatcacgcctgtgttgtcgtatctaactgaattaaatgattttcttctttgtgtaattgctcagcacaaggcagggtacgctaagcaatggcggtcaaagaggtttacggcttggtgttgacatggatgtagtcgatatccgttctcctttgcgggttagcggtctttagtgcgtcagtcgcgacgacatttgccgatgaacagcgctctggtgtggcacgttgctgtcgctccggcgatttaccgtggtaagaatatggcacaaagaaatggaatgaacatgcaacaagatcacattatgaaaatttaatttcaaatcagtgttgcagaatggtaaatgcatgaagccaatcacaaaggctaaagggagtatatccccatgaaaagcaggttaaatttacagtgaggtaataacgatgttgttttcagtgggttaatgtaaatcgaagaatactacgcagatcacatttttacgccataatattgaagaatagaatttatatttcattgtcacgatcggggcaaaatgaagatagaggccttttacctccggtctgaagggggaaatgagcggttcgctttgcccacgggggaggaggttaaggatgaatgcatcaccgggggaaacaccgggtaaaaatgcagagaaggtggattctctgcatcttacccatcacgaaaaagatcagtgcagtgcgggccagtagccttcgttggcgacgatcagttcatcgaggatggctttcgccaccgaagcgctgggcaccgttttcgacagggcgatggcctgccacagtttctggtaactgccctcaatccaggcgtcaaccaccagtttctcaactgccacctgctgctccatcaaccctttctggaatgacgggattttccccatcgccagcggttccggaccattaacgcccaccaggcaggggacttccaccatcgccgtctcatcgaagttggcgatggctccgttgttctcgacgatcaacagcatccgctcctgggtgttaaaggcgatggcgcaggcgaggtcgacgataaaggtggcatgggccccggcatggaaatgcgcgccttccgccgtgccgcgacgggtgatctcccgggccatatcaaagacctctttttcgcgtccggccatcacctcgttggcccgcgtaaactccgggtcggaatgcgccacttcatagtccgggtagagatagtatttcagataggtgttaggcagcgtcgacggatcgagggcaaacacatccttcacctttttaaaggtctcgatccaactcggcgccttatgctgaaagtcttcttttgggctgctgtatccctgctccgccacgtgacgcttcagcgccggcatcaaatcgttaccggctttatcggtgatgctggtccaccagccgaagtggttcaggccatagtaacgaacgttcagcgctttgcgcgacggcaggccgaggatgtcggcgaacagaccctcgatagccaccggcatatcgcagatgttgatgatgcgcgcgtcgggccgcaggcgacgggtcgcttccgcgacgatagccgccgggttggagtagttgagcatccaggcccctggagcgtactgctgcatataatcgaccagctccagcaccccggcaatcgagcgcataccgtaggcaatcccacccggaccacaggtctcctggcccggcacgccatatttcagcgggatcttttcatccttttcccgcatctcatacaggccaacgcgaatatgcgccatcacgaaatcgacgtcggtaaaggccgcctgcggatcggtggtatagctgaacttcacctgtgggaagcgttcagccaccaggatggcgcaggcgtcgccgatagtcttctgacgctggtgatggttgtcatacagacggatctcccgcaggggaaagcgcgacatattttccagtaacatcatcacaatcccaggggtataagtactgccgccgccggcaatggtgaccacaaaattatctttcatttaccacctcgttattcaataacacccagactggcgttgaccgccgttcgaattttgttaactcccaggccatagataacctggacatggtttcctttaatcagcacgctgctcccgccgctctctttcaacagcgtctgctggataagggcggggtcccgcacatcaacccgcagacgggtaaaacagttgcccaccgcacagacattctctttccctcccagcccggcaatcaccagcgcgcctttatccggatgctcgctattagcctgttgcgaatgctcatcttcggctgcggtttcgcggcccggggtgagcagccgcagacgggtaatacagaaggtgccgaccaggtacatggtcgcggtttccagcagaccgagggcgacaaacaccggccagcgcgtcgcgctgactcccgccgggaggttatagacgacgaaatcgatgaggccgttagtggcgcagaccctgacgtgaagcagccaggccagcatctggaaaaaaccgtccagcagggagtagataagccacagcaatggggcggtgaagataaagagaaactcaaaaggttcggtgatccccaccaggacggaggtaacaatcaaggggatcagcgtgactttcaaccgctgcttattctccgctttcgccgtacggtagaaggcgagcgccatgccggcggtgccaaaaatcttcaccatcccataggtgaggaaacgggcggaatcactgagcgcgtcaacggggtggcgggcgatttcggccaggaaaataggcttagcgccaatgacggtctgaccatcgatcagcagctgaccgccgatagaggtaaaaacgaacggcgaccagatcagatgatgcagcccggtggggatcaggaaccggttgagaaagccgtacaggaagaccccgatggcgccaaaggatttcataaagccggtcagcgccgagatgcccagctccactaccggccagagatagacggtggcgatggcgaacatgccaaccagcggcagcatcacgatcagcaccagcttactgttgccgtagatcgacagcgcgccgcgaaactcaatcccaaccacgcgattatggacaaaggcgacagcgcagccaaggataatcccaaggaatacgcccatatcgataacctgaaaaccgaagataaaggtttgtccgctgccgtacagttgcgcgttggtggctccggtcgccaggcgatgggtgagggttagccagctattattcgccgccaggtacatcagccaggtcatggccgccacgaaggccgcttcggccttgcgggttttcgccagaccgctggccagcccaaggcagaacagaaacccaagatggttcatcagcgcccagagcatactggagacaaatttccccaccaggtagagcccgctgctttcatccacccacagccggttggtcgtcatgctgaacagggcgatcaacaggccgatagctggcagatacagcaccggcccgatcatcgccttggaaaagtcctgaagctttttcactccaatcatggttgtcctctcgtctttgcagaccgctgtcatcacctgatgaataggcttatcagactaggagcagaccaccgggaacccgagcaggaaaagggccatctgtgacgaaagtcatatatattgttgctggacagatatataaatatggcgtgatttatagatgtgtcattgttgattttttcgctgcaagataaaaataatcatctaattacatgaagttattcatggttaccgttgactggcgccactccatcgagacatctaaaagtgatttataaaaagattgccactgaactgcggacccgcatcaacagcgacgactatgccgtcggcgatatgctgcccagcgaaaaagcgctcgccgcggagctgaaggtctcggtgatgacgctgcgcaaagcgctggcgctactggaggaagaaaagctgatcgcgcggcggcacggcagcggaacctgcattgtgcgtaaaagtaactatcatggcggggaactggagggctttaactaccagatgcaggtggtgggcgtcaccaactaccgtaacaaagttattgaatttacgctgcttgatgccccgccagccattgcccagcagttaaagatccagccgggggagaaagtttattacgtcagacggctgcggctgatcgatgaggtcccaatcctggtggaaaacagctatatcccattcgccaccttcccctggctcagcgtgggtaacctcgagcagtctaagttcaactatttcaaaaaagagtgccatatcaccatcatcgagagccaccgcagctataccccggtgctggcgacccgtgagcaggcggagctgctgcaggtggcgccaaacagcctcctgctgcgggtgcagtcgatcagctacgcccagaaccgggcgatcgtcgatttctcagagatctaccagaacaccagtaagtacaatgtgaagcacattacccgccgctagaggattcagaccagccatccccgggcgatcagctctatccccagcgccagcaggaacaacagaaagccctgacgaaagcgctgcgggctgagacgcgagcggatccgctgtcccagccacatgccgagcgacgccggcaacagcgccagcgccgacaatagccatgcatcatcatgccagccatcgtgcagggcgaggccagccgccaacgccagagtggaaagggtgaacgacaaccccagggcctgcaccagctcgtcgcgacgaaagcccagcgcctgtagccagggaacggccggaataacaaataccccggtcgccccggtgataacgccggtcagcccgcccatgagcggcgacagccacttctccacgcggccggaaacctgaaacaccggactgcagagcgcatacccggcatagactatcaatgcggcgccaagcgccagcgccgaccaccgaggattgaggccgatcagcagtgaggatccggccaacgtgccaataataatcccggtcatcataagccagagacggcgtacaatctgcgccagcgccgggcctgccagtaactgccagagattggtgagcagcgagggaagcaccagcagcgccgctgcggcctgcggcggcatcagcaggccaagcaggcccatcgccacggtgggcaatcccatgccggtcacccctttgaccagcccggcggcaataaagatcaacaggaaagagatcgtgtgtaaatcgaacattatggctcacttttcagggtagaaaggggcattgaaacagctggtcgtgagggccacaatgcggtatgttggccatagactacggaaaaaccgaagggaaaggagggcctgatgcgactggatctggccgatctgcggctatttatcgccatcgtggataccggcagtatcaccggcggagcggcgaatgcccatctggccctggcgtccgccagtgagaggctgcgcaagatggaggccgagatcggcgtgccgctgttgcaccgtcatgcccgcggggtgacgatgacagaggccggggaggtactggcgcgccatgcccgcccgcttcttgcgcagcagcagcgtctgcgccaggcgatgcacgccttcgcctgcggtcagcgggggacgctgcgcctgttcgccaacacctcggcgatgtcggcctttctgccggggaagctcgccgcctggatggcagcgcacccggcggtgcagatcgaaaccgaagaacgcaccagcgcggatatcgtcagctgtatcctggcgggcgtggcgcaggccggagtggtgtccgatgcggtcgaccccgggccgctgcgcctcgatcccgtcgctgacgacccgctggtgctgatcgtgccgccagctcgccctctggccgaaaaagaggaagtggcgtttgcggcggtgctcaacgagccgttggtcgccctctatcagaccagtgcgctacagcagcatatcgaacagcacgcagctgaactcggccaggcgctaaacgttcgggtcaggatgagccattttgcagggctttgcgagatggtggcgcacggcgccggcggggcgatcctgccgcgcgttattgccgagcgttaccggcagcgctattcgtttgccgtcatcgggttacaggaccgctgggcgcagcgccgtttgtgcctgtgctatcaggatgacgccagcctgtcgccagcgatgcgccgcttactggaatggcttcgtcagccttgagaacatcagtgacagtgtcacttttcatgcccgttattgctactgacatccgtgccagagatgcgatagtagaggtccgcttttattaagacgcgaatcaggacagacaagatgagtacattaccaaaggtcgcggtgctaggactcggcgccatgggacacgcttttgccagtaacctgctgaaaaacggctttaccgttgccggctggaaccgttcgccagcccgcggcgaagatttacaggcgcatgggttatctctgcacgccacgccgcagcaggcggtggccgatgccgaggtgatcatcagtatgctcgccgacggtgaggccaccctcgaggtactggcgcaaatcgcgcccgcctgtcagccgcaggcgatctattgccagatgggcaccattggcctgccggagacccggcaggccatcgctatgttgcgggaacttcagccagcgatgacctatatcgatgccccggtgtcggggaccaaagcccccgcggagaaggcacagatcctggtgctcgccagcggagatagggaaaagggcgccgctgccgaaccggtgtttgcggctatctcccgcgggacgcagtggtttggcgaggcgggcaacagccagaaaatgaagctggtcctcaatgcctggctgatttcgatgatgcagggcatcgcggagagcgcccagctggcgaagacgctgggcttcacccccgaccagctgtggagcgccctggaaggcggcccgctggcggcgccctatgtcaaagtgaaactggacgccatcgccagcgagcagtataccccgcagatgcagctggcgcatgccctgaaagatgcccggctggcgctttccctggccgagccgcacaccatgccggggctggaaaacatcgccgaactgtggcagcaggcggcggacgcgggatatgccggagaggatttgtctgcggtatatcagtggctgtcgccgtcgtcaaaagcgtagtttcctacccacgcctggaaagaagtggccatggtggccacttatcctggcggatggggcatcaattcgaatctaccgtacgttagcttaagctatcaatccattcgctctggcgtggattcagccggcgataacagtgtaccgacaccgccagctgcgtcaggtcggtgaagaccatcggatcgagctgtatatgctttttaatttgctgcagccgataggtgagcgtattacgatgaatccccaacagcagcgacgttttgcccggttcggcattattggcaataaagctgctcagggtatccagcagcacttcgccggaatcatgctcaagcagctggcgtacgttattgataaaaaaattgaccatatagctgtcttccagcaccctgaacaggcagagcattgccatttcgcgaaagtagtagatctgccgctgcggctgcactttgctacccacttcgatcaccgagcgggcgaaccgaatggcctcgcgaatgtccggggcgctgtccgcctgcacgccaatcccgatatggtaatggcttatctgattactcagtacaaactcaatgccccgcagcagggtttcctgggcttcgcttagcgcgttgaggatcaatatttcatggctgcccagcaaaataacgtcacttacgccggagagctgcgagaattcccgcaacagcgtactcagtatgtcgcttaactgatgctgttcgacctgcacggtcactacgatcggaacccgcggtgtatcaaaatcgaaaccaagttccagcaggcgatgaagcgcttcttgcccggcgggcgtagccccttgttcaagatactgacaaaacaaggtgtcacgcagacgttgccgccagttggtttcccgcatctctatggcctggcggaccagcagttcggcggtgagcaccgccagttcagcatagcggcttatcgccgcgggatcgccgctgatgcctaccaccatcaccacgcgatcgtcatagataatgggatgattaataccaggatgcacgttgtgaaaacgcgcggcttccgcggcgttgttaatacaaatgcgtttcccggtgcgtattacctcccgggcgacttcatgctgttcgccgatacgatgccgttcacctgaggcaatgatctgtccatgatggtcaatcacattcacgttatgatgaattatcgccattgcccgggcgacaatttcattagccagcgctgttgtaataatcatacagttatccgcttatgtgcctctccgcgccacccgctcagaaaggttcgtagaacattctccgcggcgtcggcgaggagcggttcgcatgtgttcatcgactctgccagcgccatagggcgctggcaaatagaccacattgcgtcaatatggtgttgatataattgccggctgctctcatcacgcccgccgcaaagggccacaaccggcacgccatggcgtgcggctttgcctgccacgcccaccggggccttaccaaacgcgctctgccgatcgagccagccttcacccacgatcgtcagcgcggcatcgcgaagatggtcgtcggcgttaagcagctccagcaccaggtcaatgcccggacgcagcgtggcgccggtataggcgataagcgcagcccccataccgcccgcggccccggcgccgggccgtccgctgacgtcgaatccgagggtttgcgtaagcagctggctataatgcgccattcccgcctccagttcgcagagcgccgcctcgtccgcgcctttctgcgccccatacacccaggtggcgccatgctcgccaagcagagggttagtgacatcgcaggaggcctgtatttcgctttgctgtagacgcgggtccaggccgctcaaatcgatgcgctgaatatgcgccaggtcctgacctgccgcgggagccggcagcagggtgccgtccttacgccagaatcgtgcgccgagcgcctgggcaaaaccgatgccgccatcgttggtcgcgctgccgcccaggccgataatcaagtgccgacacccggcgtccagcgccgcctttacctgttcgcccagcccgtagctgctggcctgacgcacatcccgctgcgctggcggcgtgagttcgagcccacagctttgcgccatctcgataatggcccgctcgccgggcaggatcaggaaatccgcctgcagggagaggccataaggcgaggtacagcgctgctgttgccacaccgccccctcaagcaacggactatccgccagagtcgacagcagtccctctccgccgtcggacacgggcatttcgaccagctccagcgtctggtcaacccggcgcaatccctgggctaccgctgcgcaagcggcctgcgcgctacagctacctttaaacgaatccagcgcgataacaatcttcatacgttctcctgcgttaatgcgctttgcgcggcgttttatcggtggtcatgagctgtaataacatccccagcagcgcacatcccgccatggtaaagaaggcgtagatataacccgctggattttcccagccgccgccaaactgaatgagccagcccataagcaatggcgaaatgccgccgccgataaacatcgccgtggtgatgattccgttagcggtcgaggtggcgcgttcttcggcggagtccgacgccatggcgtagtagataggccacacggcgttggccaccaggccaaaaaatagctgaatggcgataaggcgcggcatattggtggcgaaatagaacagcgcaatgccgatactcatccacagaccgcagacgatcagggttcgtttacggccaaagctatccgacagccagggccagattacctgacccagggtaccggtaagcgtgaagataatactcagcccggcggacgccgccagcgacaggccggagacgtgataaagatacgggggcagtacaacgttaatgcccatatagacgatttgcgtcagcagggtattgcccgccgtcagcgaaatattgcggttgcgcagggtgcgtaaaaaggtcttcatcccttcgcctttggcgacatggctgctttcctgcgtcgccgggcgcgtcaacccctggttgtcgatatgctgataaagcgtgttgatgcggtcggcggtagaatattttgcccagaagatcattagcgggatggcgacgagcagcgccagcaggaagcagtagcgccagctgccttcgccaaacgtggcaagcaccaggcttgccaccacgccgctcagcagcgcgccaatcggatagccggtatgatgcacccccagcgcaaaaccgcgcttctctttcggccaccactccgcggtgttgctgacgccgacgggttcgccccagccggccccaaggttgacgcccacgcgcagcagcacaaaggccgtcagcccgtggctgatagcttttatcccggaaataaaagacagcgcggtatagcccagcaccagcggtacctgaaagcgcgctcgtttccagccagacccgtagcgatcgctccagatggagccgggaatatccagcaccgcaagggctaccatgatcagggcgacgatattgccccactgttccggcgagagcgagaactccttagagatgaccgggccaaggcgcaggatcatctcgcgatcgtaggcgttaagcacccagattagccagcaaaccagtagcgaaacccaggagaagcgatgtatcagccgctttttgccacgttgttcgccggcaggtgtgtgattgattgttgtcatagtcgtgtttactccgcggcgtcgcgacagcatgatgcgcgccgcctggtgtcagggtcagagtcagttcgccgggtattattgttatcgcggcgagccggtggttcgtttagccggcgaagcgccgttccgctacgccggtcacgcccaggtcgtaaatggcgaacaggctgccgcgcagctgattatcttccgggaagcgcggcaggggcggctgcgccatggaggtgacgtacagcacatcaaggttttcgccgccgaacatcacgctggtcacttttttcaccggcatctcaatgatgcgatcgaccttgccctccggggtatagcgcaccagcttgcccgcgtagaccagcgcgttccacagatagccttcgctgtccacggtggcgccgtccgccgcgccgccttcgcggcgatcgacatggcaaaagacccgttcgccggaaagatcgccggtcgcggtgttgtagtcccaggcgcagatttcgcccgtccaggtatcggcaaaatagaaggtctcgccggaggggctccagcagggggcgttagagacgataatgtctttcttcagcacgtgcagtgacagatcggcgtccaggcgatatagcgcgccgctcggttcctcttcgcgcatatccattgacccgaacagaaagcgtccctgacgatcgactttgccgtcgttgagccggttaaagggtcggtccgcttccggatggtgcaacagcgtcagctcgccgctggcgaagtcgagcagatgaacgccattctgcagcgccaccaccgcgccttcaccgttctggcgcagggcgaaagagccaattttctgtcgcacgtcccagctcttgatcgcgccgccctgcgcgttgcaggcgaacaggcgcccgtcgaggctgtccacccaccaaagacgctgctgttcgacatcccagaccgggctttcgccgagtcgggtttttaaatccagtaacacttcaatgcgcataatggcctcctgattacactttttcgccgtgggcctgtttcgccgatacggagcctggggatgaggaacttttgagaaacagggacaccagcgcgccgataatcagtagcgcgacagcgaaccataagccggacgttgccgcaccggtgcggtcctcaaacgcgccgagaataaacggcccgagaaagcccccgcacagcccgaggcagttgagcaggccgaagctgcccgccagcatatgcccgctcatgatggacgggagccagttaaagatgatggattgcatagcgaagaacatgaaagcggccagcgagaagccaagcagcgccacaccgtggccggcaatggcgccaatcgccatgccggtcgccatgaccagatatccggccatcagcatgctgcgggaacgctgttccgtgcgggcgaatcgcggcagcaggatcccacccgcggcggcggcaatccacgggatggcggtcagcagaccaatctgcagcggagtaagctggccccagctaccaatgatccccggcaggaaataactcaggccgtaaaccgaaaactggtgggtaaagtaaatcagcaccagcaacaaaaacactcgggtggacagcgcggttttcagggagaaacggctcggcgtatggcgcgtttcctcggcttctttcgccagtaccgcgttaatggcttgcacatcgtcgctgtccagccagcgggcgtcggctggtttatccggcagtctgcgccagacgacgaacgccagcgctatcgcaggcagcccttcgataaagaacatccactgccagccgtgccagccggacatgccatcaaggcttaataacaatccgcccagcggcgcgccgataatattggccagacagacccccagcaggaacaggccggtggcttttgcgcgctcttcgcggccaaaccagagggtgaggtagtaaataatgcccggatagagtcccgcttcggcggcgccgagcagaaggcgcatcacgtaaaaggacgtaggcccggtgacaaacgccataccgcaggagaggatgccccaggtaatcatgatgcgagctatccagcgccgtgcgccaatccgggtgagaaacaggttactggggatctccagcactgcgtaggtgagaaaaaacaacccggccccgaggccgaatgcggttgcggaaaggccgatatccaccgacatggtcgctttcgccatgccaatattggtacgatcaataaagctgatgatgtacgccacgataagcagcggcatcaaatggcggtagatttttttatgggtgcgttgcagctgcgtcccgtttaccgccttttcatttattgcggacatggttattatttccccgtattcgtggtcagaagccttgccgggatcgagacgatcccgttcgtcagctcacaggttgtcgccgggtgctgacccgaacgacgcccggcccgaagccccacttcgggccgtcttttgctaagcgccttcgcgctcgaacagcatagaaatcccctggccgccgccgatgcacatggtgaccagaccagtgcgtgcgccgctgcgcgccatttcatacatcagtttgaccggcagaatcgcaccgctggcgcctaccgggtggccgagggcgatcgcgccgccgttgacgttaacgcgggccgggtcgagacgcagatcgttcatcaccgccagcgcctgagcggcgaaggcctcgttgagttcaattaaatcaatggactgcacatctatattgagacggtccatcaggcgtcgggtagcgggagagggaccaaaccccataatctccgctccgcagccggcgaccgcccagccgcgaatgcgcatgcgcggggttaagccgcgtttttccgcctgctggcgggtcatcatcaccagcgccgccgcgccgtcgttaatgcccgatgagttggccgccgtcaccacgccgtcggctttaaacgccggacgcagcgtggcgagcttttcacgcggggtgtcgcgcgggtgttcatcggtcgcaaacaggcgggtcgcttttttgccgtccggcacctcaagggccaggatctgctcgcgaaagcgaccctccgcgatcgccttcagcgccttctgctggctcgaccaggcgaaatcgtccatcgcttcgcgggtaataccgaagcgttgcgcgacgttttccgcggtgatgccgttgtgataagggccttccggccaggtgagaatggagatcaggccatcttccagctcgccgtggcccatgcgatagccatcgcgcgctttacgcaggtagtagggcagctgggtcatattttcagtgccgcaggcgacgaccacctcggcctggccgctttgcagctgcatcatgccgtccgccagggcctgaagtccggagccgcactggcggttaacggaataggcggtgctctcctgcgggatccccgcgcgcagctgacagatgcgggcgataaaaccgctttcggcgatttgcccgacgttgccgacgatcgtttcgtcgatatcctgcggcgcaatcccggcgcgggcgatcgcttcgcgaatgacggcggccccaaggtcatgctgatgggtatgtttaagactgccgttaaacgtgccaatagcggtacggacgccgctgacaatcacaatatcattagcctgggtcattgtttttctccttacagcaccatgccgccgccgacgttaatcacttcaccattgatatagcgcgcgccatcggacgccagaaacgccacacactcgccgacgtctttcgcctcgccggcgtaacccgcgggaattttgctgaccatgatttgccagacgttttccggtacgccgcgcgtcatgtcggtatcgataaagcccgggcagatggcattcaccgtgacaccttttttcgccagttcgcggcaggcggttttggtcattcccaccacgccggcttttgacgccgaatagttggtttgcccgacgttgccaagccaactggcggaagcgatattgataatgcggcccgcaccgcgctcgcgcatgcggatagcggcctgctgcatacagaggaaagtgcctttcaggttaacgtcgataaccgtgtcccagtccgcttccgttaatttgtgcagcatggcgtcgcggttgattccggcgttattcaccagaatgtctaccgggccaaacgcctcttcggcctgggaatacagggcttcgacctgcgttttttcagcgatattgcagctgataaacagcgcctgtgcgcccgattcgcgcagggaagcggcggcggcttcgccgtgtgcatcacgatcggcgataatcactcgcgcgccttcccgcgcaagcacctgggcaatgccaaagccgataccgcgtgcggcgccggtgacaatggcggttttactggcaagtttcatagcaacgttccttatgagtcagaggatgaattccgggacagatgttccgcgagaccgcagggcggcggggtgaacaaacggctgtccataacctgaagatccgcggcgatcaccggatgaaaatccatatgcgccaggatgtcgcgctcaagatcgatgccgggggcgatttccgtcagcaccggtccttccgggcgcagttcgaaaaccgcccgttcggtgacgtaatgcatggtttgtcctttggcgcgggccagttcgccgttgtaagaaatctggtttaccccggcgacgaatttacgcacctcgccttcgcggcagatatgcagcgccccgtgttcacaggcgatctccagccctttggcggtaaaagaggagcagaacacgacatggcgggcattctgggtgatatcgataaaaccgcccgcgccggggcaggatgcgccgagccgtgtggcattgacgtgcccgtgcgggtccatctcgccggcgcccataaaggtgatgtcgacccctgcgccgttgtagtagagcatttgatcctggtggctaatcatcgcgctcagattacggccgataccgaaatccacgccacccgcctgctgcccgccgtagatccctgactcgacggtgatggtgacctgctcgccgagctgttcctcatgaatgatggcgccaatcacgtcattgggtataccggtgccgagattgatgacgcagccgggggtcagatagcggcaggcaatccgcccgataagcttgcgcaggtccagcggcagcggcgcattttgcgcggcgggcagctggatatcgccgcacagcgctgggtcgaaggcccagcttgaagtctggcggtgatccgtctgcggctcttcgcacaccacaatggcgtcgatcaggttgccgggaacggtgatgcttttcggatgcagcgagcctttcgctacgcgatatttcacctgcgccagcaccttcgccccgtagcgtctggcggcgagaacggcgtgcaggacttccagcttcatcacctcttcatcggtcgtgaggttgccgtcttcatcagcatgggtgccgcgcacaatgaccacgtccagaggaagagccggataaaacagatattcgtcgccgcgaaacgtgacgtgctcgatcagattgggtcgttcgcgggtgcgggcgttcatccttccgccctctatgcgcggatcgacaaaggtaccgagaccgacgggggaaagccgccccggcagtccggcggccatcgcgctatagagatgaacgatctgcccctgcggcaggcaccaggcttccacttcgttgttgttgatcatcgccatccagcgcggcgccaggccccagtgcgaaccgataaggcgggtcaccatacccggatgggcaaagtgctggataccgcgctggcgatcgctttgccctgcggcatgcagtagcgtcaggtcacgcggttcgcccgcggtcagaaagcgcgcttcgatggcgcttaaaatggactccgccgcgccgataagcgtcatcccgacggtgcagacggtgtcgccgctggcgacccaccgcgccgcctcatgggcgtcgataaatttgctgctcactttttatcctccgttgatagcgtgatgatggattctgcgagacgctttttgagctgctgtttgctcactttgccgttgtgggtacgcggtaaagcacgggtgaaaataatgcgcgccggtagcttaaaacgggcgattttgaccttgagccagtcgaggatctcttcgctggtcaggtgatgctggccatccggcacgataaacgccacgggctcttcgccgtagaccgggctgggggtcgggatgacggcaacttcccgtactccccgataggtagagagaatgttttccagctccagtgagtaaattttctcgccgccgcgattgatcatgtccttgctgcggtctttgatgtacagccagccttcgtcgtcgagatagcccagatcgccggtacaaaaccagccctgcgcatcgcagctcgggcgtcgctcgctgtgctgccagtattcgcggatcaccacatcgccttttagccagatatggccgatttgtccggcggggaggggctgctggcgatcgttgcggatggtaatggcgagacccgggatcgcctgacctgaactgccgcatttatcgctgccccagacgtcgcccggaaaaatcgtcgcaggcgaggtcgtttcggtgaggccgtagattggctgaatcgcggtatgcgggaacagggtttttaactccttgatcagtccatcgctcaggtggccagcgccgcaggcaatcgtgcgcaatgccggaaaatcgctgggatggttggcgctctgctcacgcgcagcctggcaaagaaggataaaaatggtgggcgagccgtgcagaaaggtaatgttctgctcgcgcagggtggtgatcacctgcggggcattgaaccgatgctgcagccagatgctcgcgccgaggctaataaacagcgccaacagcgccgacaggccggtgatgtgatagataggtaccgccaggatggtgctatccgcggcggtgagattcagtttttgcgtataggcgtcaatcgcgcagagcaggttattgtgggtgataatcgcccctttaggctctccggtggtgccggaggtgaacatcatcaccgccgtatcgtcgcggttaaccgggaccggcgggcgggtcagcggttcgggaaggcagagcgcctgccattcgctgagtgaaaccgcacgcgcgtcgggggtgtttttcagccagtcctgcacggtcgcatcgaacaggacaacccggggagcgatatggcctaccagcgcctcgctttcggcctgcttaagcttggtgctgaaaggcaccacttcgatgcccaaacccagcgcggcaaaaaggacttcgcaaaaagcggggtgattgccccaggccagcagaatacggtcgcctttgcgcagcgaccagccgcgatcaagctgcgccatcgcccgctgtacccgcagatgaaaatcgcggtacagatagcgccgatcctcaaacgccagcgccagggcatccgggctgcgggcggcgctgcggctcagggcctggtacagattctggaagtcggcggaggtgctgttcatgtgtctctcctgatatcgcgtattgagtaggagtagtctggggaaattcaggagaggaaattgccgaatggctcacaatagaaaatcaacaaaacagaagcaattttgtaacattgcacaatgggcaggagagaccgggtgggggagacatatccccgaatcaaaccaacgtgaataaagccagaggacgctatcttttagacccgtgttaaccgggcctaaaagagtgaaggggtcagccctgccgcttagcgtttacaggcatcgaactcgagccgttcgccatcggggccgcgaataagcaggaagcgcacgttgtcttcttctatcggcccttcatcgagcggataaccgagcgccgccagccgctgctgcaccgcatccaggtcgctgacttccagcgccagatgatcgataccgcagcgaggggcgtcaaagggcgttccagcgggaagctgatacagctcgaggacggcgccccccatttccaggaacgcaacttcaatagtgccctgtggcgatggcttgctaaaccgctgctggcgctgaaagcccagcggttcatagaaggcaagcgaacgcgttaagtcactgacctgatagccaatatgagcaatcgtgttgataagttcgcgcatgttatacccccttacgcacgcaccagaagccgtagaaagcgacatacacaaagcacaggagcggagcgataaaggcgatttgcatattgccgccgttcatatccgagataatgcccatcaccagcggaattacggccccgccgataatcgacatcaccacgatcgagcctgcggtctgggtatctttccccatccctttgatcaccagaccaaagttcgtcggccagcatggcgccatacagaagctgaccagaatgagcgcatagaccgccagcattgaaccgctgaaaacggcaatcagtaacagggcggtggcggccagggcaaacgttccgagcagcatcgccggattcagacggttcatcaaccaggtggccacggtttttcccacggcgtaaatcaccagagaagccagcagccagtaagtcgcggagtgctcgctggtgccttgctgcacgagctgcacaaagcgaatcgtgaagctccatacgccaacctgggcgccgacgtacaaaaactgcgacaggatcccgaggcgaaagcgcgggatagcaaacaggcgtttcagcgttggccccatgctttccgtcgggagttgttgctgttgagcgggcgcgcccttgcacgacgggaatttaataaacacgaacaccagcgccagcaccaccagtacggagccgataatcagatagggcccgaccacctgaccaaccatctgatggcgtgcaacgtctgcagcggcggcgggcatcgccagcagttgttcatgactcggatcgttttcgccaaagaccatcagctggccaattaatacgccggagatcacgcccagcgagttgaagatctgcgaaaagttaatacgctgggtggaggattgaatcggacccagcaggctggagtaggtgtttgccgacgtttccagaaaagagagtccgcaggcgatcactccgaggcaggcgaggaatgcgccgtaggtcatgatctgtgcggccggaacgaacaggaagcagccgagggcgtacaggcacagcccaataataatcgccgctttataggagaaacgcttaatcagcgccgccgcgggcagggcgacaaaaaagtagccgaggaaaaaaatcgactgcaccagcgctgtctgggtatccgttaaatcgaagccctttttaaactgggcgatcaaaatatcattcaggttgcccgccatcccccatagcgcaaacaggcaacagaccagtaaaaattgcagccagggggtatggggtaaatacgcactggtgtccagtttttctttttggaccgctgcgttatcgaccttatccgtgattagcgtactcattgagctatcctcttaatgttttttatacagtagggtttatgccatttcataatcagcggcggcacggagaagccgttcctgtgcctccaggtactcaggtaaagatgaggcgccttgcttttcgacactgacggcggcataggccgccgcgaatcgggctgcggcctgtagcggttccccgcaggccagccgcgccgccagcgcgccgttgaaggcatcgcccgcaccggtagtgtctcgggggtgagaaggaaagcagggaacacgagatttcaccccatgctcgctcagcagggcgccgctggcgccgagagtgataatgacgttgcgcgcgccctgagcatgtaacacgtcggcggcctcagccgcggccgtcagactgtcaacccggcgtccggtcattaacccggcctccgtggcgttcggtgtaagtaaatccactttgcttagaacggcgtgctcaacgggctgccagggcgcgggattgagtattaccagggccccggcttgtttgccggcgtctatgacctgttcaatagcagaaagattgttctccagctgaaccagaaccacatccgcgcagccgatagcgggaatgcagccggcgatttcatcatcggtcaccgtcatattcgcgccgggatcgacggcaatcatgttttcggcatcgttaccggcgacataaatcagcgcattgccggtggggatctcttcggcgaccagcagcgtcacagcattgaagcccacgcctttcagatgacggcgggcaaaatggccgaaggtgtcattgccaatcttgccgatatagtggacatttgctcccgcttttagcgcggcggtggcctggttcgcccctttacctccggcgctggtcatacttccgcaggccactaacgactcacctggtaccggaaagcgatccaccctggcgaccatgtcgaaattgaatgaaccaaaaacacagacttttcctgacatcattcgctcctctataccagctcgggggagtgcagcgcggcggacagttcgcgggacatggtttcccaggccagctcgagcggcatatcagcgcggaataaaccgctgctgcccatcactaatatctgtgcgccggcgcccagcagcgcgcggtaggtgttgcggttacaggagccatcgacttccagcaagaagcggaggctgccggtctctttgagctgatgaagctgcgtaattttggcgagcatttcaggaataaacggctgaccggcatagcctgggtcgacggtcatcaccgtcaccttatcgagcagatgcagatagtgctggatgctctcaaccggtgtggcgggattgagcaccattcccacctctttccccgcctgacgaagcatattgataacccggaacgcttcgcggcagatggtctccggatgcagtgagaaggcgtctgcgccggcgtctaacagcgccggtataaacgaagcgggcgcttcgaccatcagatggacatcgataggaagcgaggtgtagggacggatctgcgccacaaagctggccgacaacgccagatttttgacatagtggccgtccatgatgtcgacatgcagcctgtcggctttgctgtttagaaagcgcagctgttccgtcagcttcatcatgtccatacacatcagcgagggagaaagataataacgcataaggcctcatttattccggtggtggctgaattcaggcaaagtctggccctgccgcggtaagcagcgtttcgacattgcgcgtattaaccgtcacgtcatgacggcgtactcaggcgatttgcaggctgacgttatgccaggtcatctctttttccagcagcggatcgacaaacctttcagtcaccagacagtccagctcgcccagtccgccgatacgcgcgacgcctgttcgccccagcttgctgccgtcgaccaaagccacagtctgacgggcggccagcagcatctgtttcagcagggcggcgtgggcttgcgtacccgcatacaagccgctatcgcgctccagcccctggcaggagaaaaagagcgtatcaatggcatattcgcgtagcgttcgtgaggcggtttccccgaagaacgactcttcggtcggggagaaatcgccccccagtccgacgagatgcaacgagcgtcggctcatcagagtttgtaagatgcgaatggagggcgtaatcaccgtcaacgccatctccggcatctgccgggccaaaaaccagctggtgctactcccgtccaggacaatggtctgtcccggttggagaaactgcagtgctttacgggccacgcgcattttgccttcgctgtgcagcagcgttctgtgctgaaagcttccctggctatcttcaactggcagggcggatgccgccgcccgggtcgccggcagcggattttccgccgccagcgctccaccgtggcttcgggttaagatccctttgcgttccagctcgctcagatcgcggcgaatcgtttccctggagacccgagtcgcttgcgcaatctcattcacccgcatgacgccgtgttggcccagcagttcaacaatcaaacgatgacgttccagcggcaacatagctctctcctgaagtacataatcagattacctttcccttgcgcagagcgttgagacctcgggaatgtcccacgaaggcaagctatccgcagccgaacactgtgatagcgcacgcatttcgcttcacttccgtcagcggtttgcgctatttcgcccgtgattcaggcataaacaaaaacaaacaaaaataaatgcaagattgcttttgcgcccatttatgcccgattacgcctgctctgcaaggttaacgcttatttcctgctgctaattaaaaacaaatgaaaataaaaaaatgctaatttgatcacgttattttcatttaatgcgtttttaaatggatttaagccaaatgtcagcattaaatgaaagcaattaaaaacaaaggacaggataagaccatgaatgaaacaacccatcgttttgcacgtttagttgatctgagcgcagttcaggccaccagtaccgaagcggatgttcgcgcctgcgccgagctggctgccagatacaacattatttccgtccacgtactgccttgctggacgcgctttctcagtacgttgctgccgcagcagggtacgggagaggtgatgattggcggtccggtcggctttcccggcggtgggcataccaccgataccaaggttcaggaagtgcggcagctgattgccgacggcgctcgggaagtggatatggtcgtgaatatcggcaaagtgctctccggcgattatgactatgtgcgcgaagatttgcgccgcgtggtggaagccgccgccccggtaccggccaaagtgatccttgaaacgcactatcttaatgaggagcagattcgtcgcgtgtgcgaaattgccgtagaggtggggatgaagtgggtcaaaacctctaccggctgggcgcccaccggcgccacggtggaaaaagtcaggatcatcgccgaccagcttaaaggccgaatcgatatcaaaggcgccgggggcattcgcgatctggccacggtgcgtgcgctgtaccagcttggcgtgcgccgctttggcatgagccatggcgcggtaaccaaggtgctggctgaactggagcagcacccggaacgttttcccgagctgaacgccgattaaactgagagaccgcgggcctggtggcccgccttaagacgtcaccggagttagtgatgaaagataaaatactcacgattgatgttggcactggcagtacccgcgccgctattgtgcgcattgacggcgcgatgatcggctttgcgcaaagagagtatgagcaaaccacgccgcgtgcaggttggtcagaacaggccccgtctttatggtggcaggccgcctgcgactgtatacgcgaggtgctttaccgctatcctgaaacggcagcgcaaattgcggttattggtgcttgcggacagatgcatggcaccgtccttctggacgaccgtggcgagctggtggaggatagggcgttgctgtggaatgataagcgcagccagccgcaagttgacgcctttaacgcgcgcgaaggttgggaaaagtggctggcgcatttgaataatccgcctgcggcagcatggcccgctttcaagttagcctggtggcgcgaaaatcatccggatcgctggtcgcagctcgccaaagtattaatgccgaaggactatattaatttcatgctgaccggtgccatggcgaccgattatagcgaagcgtcgtgctatttcctgatggacagcgaaacccgtagctggtcttcgcaagcctgcgaaacgtttggtctgcgggtcgatcagctcccggagcttaaactttccagcgacataatcggccaggtgacgcagcccgcagccgacctgacgggcctgccggcgggtatcccggtggttgccgggacgtcggatatggcggcctctctgctgggctcgggtgtgtatgaaccggggatggcgtctgattcaaccggcacgtcgacgctgatgacggtggtgtcgccgcggccgttacaccatccgctggttaataatctacatcttgccaacgcggcctggggcggatttacgatcctcgacgccggcggcgatgccgttcgctgggcgcggctggcacttgccgataaccagattacgcatccacagcttttacaggaagcggcggcggtgccggcgggggcagaagggctgctgtttcttccctatctgacgggagaacgtctggccgaacacacgaactcgcgggcacagttttttggcctgcagcgcaagcatcgccgcggtcatttattccgcgccgttctggaaggggtggcctttgcatcctggcgcaatcttcggcagctgcagaagtgcgggcagtatccgcaacaaatgatcgcttccggcggcggcgcgcgcagctcgctgtggcttgaaatcaaagcctcggcgtacaatctgccgatattatctacgcgtaatcaggagaatggcgtcaccggatgcggtattatcgccggggttggcgtagggttgtacgccgattttgccagcggcgtgcggcaaacggtgcagttcgaaaaactgatctcaccggatccccttctgcgggattattaccacgcctgctgcgagctttttgatacgctgtaccggcaatccgctgccttatacgacaggctggatgcgctcagcgtaggacccgactgatacgcaaaggtaagccagcgccgcgacgcgcgtaacgagctgtaaaaaagagagaggcagaatgtttgcagaagaaagacaggagaagttactcggtattctcagggaaaaacgcaaagttgctgtttctgagatgtgtgacgtctttaatgtatctggcgctaccattcgtgccgatctccgccagctggaagaggaggggttgctgacccgaacgcatggcggagccgttcttcgtacccgagcgagcttcgaacaagcatcggacgcccgcgaaattgtcaatctcagcgcgaaagaacggatcggccagcgcgcggcggcgctggttgaggatggcgatataatcgtgctggataccggtaccacgacgctacatatcgcgcgcaatattcgtgacagacagaacgtcacggtggttaccaatgattaccaaatcgcccgggagcttgaggccagtccctcgattcaaacgattctgctcggggggatcgttaagaagggataccactgcgtggtggcgatcaacggacgttccattctcgacacgctaaacgtcgataaagcatttatgggcaccaattcgctgtcgctgaaacacggcgcctgcgtggccgatatcatgctggcagaaacgaaacgaggcatggtggaacacgccagtcaggtgattattgtctgcgactacagcaagctgaataacacctcgcttgcccaatttaccgccgcagatcgaattgacacggtggtggtggatcgtctgcctgatgatgttcaggcgtatcgtaatgccggcattcaggtgatctcgctggatgaagaggagtatctttagcgcgctgctgtgacgttgtcactaaccagcgcgtcgtaaaatcccgtccatcagggcggggtaaagttttgggtattagactcacgtgccggggggatatcgaagaccaggcatggtacaggcggtccagaattgattaaagcttacccgctgactttctcagttcagtaatatccctcttgggcgattccccgaacatccgcgtatattcccggctgaaatgggacaggctttcgtaaccgaccgcataggctgctgtggtgacatcgtaatgttcattcagcatcagtcgcctggcttcattgaggcgcagccatttctgataccgtagcgggctcatccccgcaagctgcctgaaatggtggtggaaagagggcgtgctcatttgcacccgacttgccagttcctcgacgcgtaaaggtgatgcaatattggtctttaaccagtcgatagctttaccgatacggtagccatggccgtcgactgctgcaatctgtctgagatgatcggactgatcgctcatcaaaagccggtagtgtatctctctttggatcagcggcccgagaacaggaatggcttcaggttcgtcaagcaaagaaagcagacggcagaaaggctccagcaaagcatcggtaatagtacctatcccgacactcgttcccgcgtctcgttttttgaccggcggcaggcttccctgggcaattaattccattagcacgcgctggtcaagcttataggctacgccgacgcagggctgggatgtcgaagcctgcaatatttccgaactggccggcaggtcaagagaggttatcaggaatttttccgcattatattcataaggttcacccccaacccacatgatcttcgcgccatcggccaccagaacgatactgggagggaccaggcagcttaccgggggagcgggttcgtttcggcgaaacaattcgagcccttctacggcggtagggaaatcgccggtgccgggtgtgcgctgtgcaatatccctcgatagctcacccagcagtatttcaaccgatttgtcaggaatcattctgtaatgccccacacttttgacctcttttgaggttatcaacttagcagctatgaaaactgaaatacacgctttgagattaggttcagaggatcaggcaaataatgcagagtattttaataacaccttatattaaagacattcaaaataataactctgaaatgaggcagtgtcctgaaatcagggttcaccgcgagcaaatttaacccgttcaggtttaagccattttttaactgccacgacggcatcgctgcgcttgagaagtggtttgaagaaattggtacgccaacacgtcttgaacagctgaacatcaaggaagcagatctgcccgctatcgttgagaacgtccagatcaatgtcaaagcgtttggtatcgccagtgattaccggccgaaagttgtaactgaaatactcatgcatgttgtctgaaataggtccctcaatatccaatgaaaggttttaatatcatgacgctaatatcttcgacgcgcttttttaatggcgcactccttgccggggcgatggctctgatttcaacagaagttgcggtggcccagcctgcaccaggcacagcagattcttcaggccgtctggttcagacgtgggataaaactttcccaaggagcgaaaaagtggatcatcaaaaagttacttttaaaaaccgttacggcattacgctggccgcagatgtgtatcttccaaaagatcgcgggaacaagaagcttgctgcgcttgttatttccgggccttttggcgcggtaaaagagcaggcctcgggtctctatgctcagactttagcagagcgcggattcgtgacgctggcatttgatccgtcttataccggtgaaagcagtggtgaaccccgcaatattgcttcacccgatatcaataccgaagactttatggctgcagtcgattttatgggactacaaccttatgtggatcgtgaacgtatcggtgtcatcggcatctgcggcatgggggggattgccctgaacgctgttgccgtggataagcgcgtaaaagcggtcgttgccagcaccatgtatgatatgagccgcgtaatgtcaaaaggctacaatgacagcgtaacaccggagcaacgcgagcaggcgctggagaagatgagtcttcaacgctgggaagatgcagcaaacggcaaaccggcataccagccagcctataataaactgaagggcggtgaagcacagttcctcgtggactatgcggactactacatgactaaacgcggctatcatccccgagccgtcaactctggcaattcatggtccgtgacaacgccgatggcctttatgaatttcccgctcatgacctatattaaggaaatttctccgcgcccgatcctgttcatccatggtgaaaaggcgcattcgctttacttctccaaaacggcttatgaagcggcaaatcagccaaaagagctgctgattgtaaaaaatgctacccatgttgatttatatgatcgtatggacaagatcccgttcgataacatcactgcatttttcaacaaaaatcttaataaataagccatagcaccgtccggtgttttcagatgcagtgtctgtgggacaaacgacagatactgctctcttagcatggggtgttgggtattctattgttactgataaagctggcactaattcctgatgcgatattaatttccgaatattatcgagttaatcctgcgacagaaaaaagcaaccacatatgaaagaggagaggtatatgtactggaaccctgaagtattaacaagaatagatgcggccgacgacctgaaaatcgcaccgtatcatcccgatatgaatacgaccggtacgccgacatggatatgggaagtgaaggtggacaaccgacttttcgtccgagcctatagtggtatccgttcaaaatggtatcaggctgcattgtcccagcaggcaggtaagatactggctatcggacaggaattcgacgtactgttcgcaaaaccctcggaccctgagcttgaaagtaaaattgatcaggcttacctgaaaaagtactccggcagcagctatgtttccgcaatgacagggatacgcgccagggcagccacgattgagattctaccttcgtgatgtcctgtcaaagtgatgctgcctgtactgtgaggcaaaatctacctgtttaacgttcatctccctgaaactgaaggcacgtatgaaaccactctttccgagccttcaggtttttacatccttttgttgacttattctgtaaaaagattacttttcaggacatgaaaaagatacttattattgtacccgatggcggcatgctgtttgaatccgccggtattgctgacattctgatgcaggccaaccgcctgcacccggaaggtgcccgggaaatctgctaccaggtcaagctagcgacaactcaaccgcatcaggttatccatggtcagtcaggtttaaatctgctggccgaccatcgtctgcatgagattgaccctcgcgagcccctcgataccatcatgattaccggcagaggtcaaaacccgcaggaggggatggcagtggttgactggttgcgccttgccgctccccatgcccgccgcatagtctccatttgcggcggtgcgatgctgctggcgcaaaccggactgctggacggcagacgggccactacccactggaagctgctggaaaccatgcaggcggaattcccgcagatccgcgtcgagggcgggccgctctatattcaggacgaacatatctggacctctggcggggtcagttccggctttgatcttacgctggcgctggttgaagaagactatggcttcagcctggcgcgcgatatcgcccaggacttcgtcatgtatctgcgtcgcccgggaggccagctgcagtttagccgctataaccttcagcagaccgccacccagggcccgattaacgatctgctggcgtggttgctcgaaaacctcaccgccgacctcagcgtagataagctggcggaaaaagtcgccatgagtccgcgaaatttcacccgcgtctttacccgggaaaccggcgcttcgccagcgcggtacgtcgcggaagcccgcctggccgccgcgcggcagcgtttggagcagactcacgagacgctggatcgtatcgccgagcaaacgggatttggcagcagtattaacctgcgacgcttgtttgagaaacagcttaacctcactccaggtgaatatcgtcaacgatttcactgtcgcaaaatggcgtaaagtgatccttttttgtcatttacgccataacccgtccgtcctactctgactccagcgataatcgataaggagttaattatggtaaaggtcggtattaacggttttggccggatcggacgcaatgtactgcgcgcagcactgaataatccggatattcaaattgtggcaatcaacgatttgacggacagcaaaacgctggcgcatctgctgaaatacgactcgcttctcggtaagctggatgcagaggtcaccgcgggtgaaggggggcttgttgttgatggtaaacccattaccgtattcagtgaacgcaacccggccagtattccgtggcgtcagtgtgaagtcgacatcgttattgaggctacaggattattcacggaccgtgaaaaggctgctgtacatatccacagcggtggcgccaagcgcgtgattatctctgccccgggtaaaaacgatgatttaaccattgtgatgggcgttaatgagagcctttactccccggataaacactacgtgatcagcaacggaagctgcaccaccaatggtcttgcacctgctgcgcaggtcctgcaccagcatttcggtattaaacatggtctcatgaacaccacccatgcctacaccaacagccaggcgctgcacgatcagccggaaaaagatctgcgcggggctcgtgccgccgcattgtcgattgtgccttactccagcggcgcagcgaaggctctgggtaaagttattcctgagctggatgggcgtttaacgggatactcgctacgcgtccctgtgccagtggtgtccattgttgacctcaccgtcacgcttgagcgagatgtgacggtcgaagaggtgaacaatgcttttcgcgaagccgccgcagcgggacctctgaaagggatcctgggttatagcgatgaaccgctcgtctccagcgattaccagggagacccacgctcgtcgattatcgacggtctatcaacgctggtgattggcggtaatatggtcaaaattctggcgtggtacgacaatgaatggggattctctaatcgtctcgttgatctggcattgatgatggcaaagcgtgaaagctaagccactgtcgctgtattcatctgtaaaagtataagcagttcagctggatgaatagtggctcgagtatcattcatagatgaaacataacaaatctttctgaccgcgatataaaagcataaatgcccgagagagcatttatgctttttcggcgatgaacggaattgcgatatgttgtggccaggtacttcctggtggtagctaatcaccagatacaaggaaagggggaggtgaggcagagcctgtcaacatggaagccggctgcgtagggcttcagtacaccattcaacttcagctggcggttctgtttatggtcgcgatggcactcgccatttgagtgcggaaaacgaagctggcatctttttgataatcacgtctgtggctgatcaagcccggttgatacacactgcaggcggcgcgctatcaaatgagcatttcatctggcatcccgtgacgcgttcggtcagaaaatgcaacagcagtaagatatgccggacagtacaagcagcaggtgtggctgaatgaatttccctggcttttactgtaggagaacaggctgtagtgggcgaagtgattgttaaaagccatgcttgatttatcacctcgaacattttgccttatagcgcagcattcacgtgcatgaaaggaatgacggtcatagtgttgatgtgggaagaggcagctatcaaagatgacgttattgagtacgacattgcatttaacataatatacattatgcgtactcatgttgtaatggctcaatagtaatgtccgcctgtggctcaattcagatgtccgcgctatggtaagcttcactggtccgtttaaactaccgggaggcatatcatgagcgcagaaagctcaggagtgtttactttgaaagagatcaaccggatcaagattatacaggacgtcattgaacgtcgcatcacaacgcgccgtgcggccgagcacctcggtatcagcgacaggcaatgccgcagacttcttgcccgttaccgtgaaggcggaccgcttggtatggccagcagacgatgtggcatgcgtggtaaccgccagttgccacccgggctcgcagatcaggctctggaactgatcaagacgcgttatgctgatttcggtccgactctggcgcgtgaaaagctcgaagaactccacggactgtttcttggcaaagaaactgtccggcgcatcatggtgcgggctggcttatgggttccccgtaaacaacgtgccgcaaggatccctcaaccacggtaccggcgtccgtgtactggtgagctgatacaaatagatggctgtgatcacgactggtttgaaggccgtggcccggcctgcaccgcgctggtctatgttgatgatgcaaccagcaaactgatggaactgttgtttgttaaatcggagtccacgttttcttacttcgaagccacgcggcgctatatcgataagcatggtaaaccgctggcactgtacagcgataaagccggtgtttttcgtgttaacaataaacacgccacaggcggagacgggcatactcagtttgggcgagccatgcatgaactgaacatccagactatctgtgcagaaaccagtcccgccaaagggcgtgtagaacgagctcacctcactttacaggatcgtctggtcaaagagctgcggttacagggcatttgttcaatggaggctgcaaatgacttcgctgaggcctatatggctgactataaccgccgttttggcaaagtaccgcgacatgattttgacgtacaccgtgctgtagaacatgatgaggacctggggcttattttcactgttcgtgaaaaacgtaaagtctcaaaatcgttgacgatacaatatgataaaatgttgtacctgattgaagacagcgaactgagtcgccgtgcaataggtaaatatatcgatgtgtatcactatcctgatggcagaaaagagctgcgcctgaacggtacgctacttccctactctacctacgaccgactgtcagaaatcgaccagggcgcgattgtcgataacaagcgtcttggccgaaccctggagtttatcagtctggtgcagagcaagcgggataacacgcgctctcagtcaattcccgctggagatggcccttcccgacgacggccaaagcaggaagggaagaaatcccagcgctcactggataatgatgacatgctcgaagcactcaaacagcttcagtcacgttcagaggacatttttggtaaaagagcccgctgatggtactcactggccggacagtggttgctcaccagttgatattgtccggccagacccatgatgtattattcatttcgttcagcatctttatgtcctgcttttcacgggcatacttaccccataatgaatgaaaagaacgaacaatactgattaactgcttttttctttgctccggagataggctgataaaatagcagcacctgctgtcaatattatcctcaatgaaattaaaatcagagtctgatgcatattttactgttagcataatatcattcgacgttgttctctcagactctgttaatgctgattctatcaggtattcaaaggcatacatgacagacagctggtttttgtctgtctgaatataacccattgagtttctgagtattgaggactgtaccaggaccagaggccataaaagctcaacaccataaagcttatatgtatcatgttgatcatactgatgttgctcaacacgacgattaccttcccgtgctttacgaatatcataggcaagggataacataaatccgtctttaactttaatcagtgggctttcatccacgatgtaatgaatgagttcatgtaattcattcagggcttctgaatctccccacagtataaaacctgcattgttcggcgttaactcgtatcgaagcatgggctcaatcatcctgttgtttcagtcggaggaaagtctatcagtaaagagaatgagagatcaaagtggtcattttaattgagctggataacggacatttcaattgagccttgacacatgttgtagtagctaacttgagatgtccgtctctgaccaaatagacatgtccgcgctacagtctcaccacagcgatcactgctttcaaaggatgagactcatgacggcatacggaacggagtttttctcaatgagagatgtaaaccgactcaggatccttcaggatgtcatcgaccgcaacctgcgtcctggtctggcagccgaaatgctcggtatcacgccgcgccattgcagccgtctgctgaaacgttatcgtcagtccgggccactgggcatgaataaccagagtcgtggtcgcaccggaaatcgcctgctttccgcatcattgactgatcaggccctgaatatcatccgtgaacgctatgccgattttggccccacactgacgtgggaaaagctcgctgaaaatcacggtttactgatgagtttatgaccgcttataaccggcgctttggcaaagcaccccggcatgactttgatgttcaccggccacttgaaactgatgatgatctgaccgcatttttcacatggcgggaaccgcgccgtgtttcaaaatccctgacggtgcagtatgacaaagtgctctatctgattgaagacaatgagttaagccgaagggctattggcaagtacattgaggtatggcattacccggatggccggaaagagctccggctaaacggggttgtccttccctactccacctatgatcgccttcagaaaatcgaccagggggctatcgtggacaacaagcgcctcgggcgtacacttgaatttatcaaactggtacaggacaaacgcgacaataaccggtcacaggctctccctgccggagatggcccctcgcgccgacgcaggaaacccacagagaagaaatcccagcgatctctggacgaagacgatatgctcaatgcgctgaagacattacaatcacgttctgacgagattttcggtacaaggaaatgacatggagatgatggcagacataatcccatcttcatagagctgcaatgcaagagagtttaaggtccgctttgagcgaggagcggacataacggtcaatctcgtcaccagttactccaacgtaaaagtgtgattaaatcaaaaggctccatgttaataaagcatagtgatggcatgatacattaggggataaaattgctagttcaaactaatcgattgtaccttcggcctgtaatctcatcagacttaaacgatctattcaaaatttatggtgatcccgctacgaacacttttaatcctgcgggaccatatccgaacattgatcatgcaaaaatggttatgaatcgctggctcgaccattggcaaactcatagttttggaaactgggcaatttcgcttcttactaatcctgaaaaaatcatcggttttggcgggctgggaattcgtaattatgacgatatagttatcaataatcttgggtatcgcttatctacagaggcttgggggaagggtctggccacagaatttgccatatacgcgataaaatttggatttgatgttattaaattaaccgaaatttcggctgttgttcgagagaatcatctggcgtcacagaaagtgttacagaagtcggggttaagatatgtcaaagagattcatgatgttaaagatgcacctccaagccttctgtattcaatatcagtggatgagtggttaagaaagaaagctgccgctccggggttagcttaaacacgcgccccgtcgccacatcaacaaacagcaggttattgttccgatcgaacacgatcccttcgagcacgagcgacgcctgtgaaacgttgaagtacggctgggcctccacggtctgaagagaacgctcccagggcggtatggggacggcactgcatgtaagcgcgttatgatttagtccattcatgtggtttatccccggcaataatacagagggagacttcacctgcagtctccctgtgacagcaggtattaacttttatcaaactgactttcggtaaacggatcggcgcgaccgccctgcaatgggattttggcaagcgccgcatcgatttcgcgtagctcgctgtccgtcaaccggacttgcggtgcgccgctgttttctatcaggtgcggatattgcgtcgtacccgggattgggacaatccagggccgctgggccattacccaggccagcgcgaactgaaccggagtggtgtttttgcgacgggcccacgactgcgcaaattcaagcagcaccatgtttttggccagggcatcgggctggaagcgtggcaggttatgccgccgatcggtgctgtcaaaccgctggcttggattgactgctccggcaaggaagctgcgggcagtcgggcagtaaggtacgaaaccgatacccagctcttcgagcgttggaaatatccgcgtctccggttcccgccaccacatggcatactcactctgcactgcagtcacagggagtaccgcatgtgcgcggcgaattgtcctggcactcgcttccgacagtccccagtgtttcactttaccctcctggatcaacgccttcacggtttccgccacatcctcgatcggcacattcgggtcggggcgatgctgataaagaagatcgatgtggtccgttttcagacgctttagcgagccctctacggcacggcggatatggtcagggtggctgttaagggaagtgggcttcccctcctccacgccgaagccgaacttggtggcaatcaccacacgatcgcgaacgggagcgagtgcttccccgacaaattcttcactgagatgggggccatagacctcggcagtatcaaagaacgtgataccttgttcgaaggctgcccggataagcgaaaccatggctttacgatcgcgcggacctccgccgtaataacccaccatcggcaggcacccgagtcccatgctggacacctccagcgagccgagtttacgcgtggttaaggtttccttccggacgggagcagcatccgaaggggcgttcggcgtgtcctgaccagccggtttcgccatcacggcgccgctcctgccaagggtggttgcggccaaagccagaccggcgccggcgatcagaaaattgcgccggtcccgggaagcgggtacggcagcagaaggctggtcatgcatcatcttgctcataaactggaactccctataacgaagaaaggattcattaatttggtcattaccaggcataagcctggggcgcttctcccccggggccgggccagatttcgtcgagacagctcatggtgtcgtctgatagcgtgactgtcgttgcgtgaagcgcttgctggagttgttcgaccgtacgaggcccaatcagtggagcggtaacgacagggttctgcaggagccaggccagcgccacatcggaaggggattcgccgaggtcatcacataatccttcataggcttccagctgcggacgatactgttcaatttggcgggcaagcgcgggccttgctcggcgcccgcttgccatctttttcagtacgccgccaagcaaccctccggcaagtgggctccagggaatcagtcccaggccaaaatgacggcatgcgggaatgagctccagctcaatggtgcgggcagtcagattgtagagactttgctcggcgacaaggcccaggaaatgacgggccgtggcgactgactgcgcagtcgcaatgtcccagccggcgaaattgctgctaccgatataaagaacctttccctgctgaacaagcagttccatggcctgccaggtctcttcccacggtgtatgacgatcgatgtgatgcatctgatagacgtcaatatggtcggtcttaagccgtcgcaaactgtcctcgcaggccttgcgaatatggtaagcagaaagccggcgatcgttcgggcccggtcccataggctgatagacttttgtcgccagaacgatgcgttcacggcggccaccctgctgaagccagcgaccaataatttcctcggacagccccgagccttgctggatatcgggagattgttcagtgccatacacgtctgctgtatcaatgaaattgatacccgcctcaagcgcctcatccagaatgcgggcgctggtcttctcgtcggtgacgtcaccaaaattcatggttccgagacaaaggcggctgactttcaggccggtgcggccaagatgcgtatagttcataaacggctccgttagatgagtgttccgccctggcctaccagccagagcgcatgattttcaagaataacgaagcacaacgtgtacagtgagtggacgtgcatgaatggacttgtgaaaaaaattcagcaatggattagccctaatcggtctaaggtgtatatcatttcttcatcaacgcattcgggttttaacgccgcataaggaaaactattctgtatgcaaataagcagagctgatgttgccgatcttatttatttcatggcgattgcacgtcatcgcagcttcagccgtgcggcaattgaattaggcgtcagtgcatcagcgctgagtcatgccctgaagggactggaaacccggctcggagttcgcctgcttaatcgcacgaccaagagcgtcacccctacggcagctggtgaggaactggttcagtctgttcttcagcctttcgacaccatagaaggcgcgcttgaatcgcttaaccggtatcgcaatacccctaccggtcgtatccgcatcaatgcagccgttgaagcggcaaatcttttgcttgcgccggtcatgcccgcttttatggatcgctatcccgatattgaaatcgatattgtggccagcaaccgaatggttgacgtgactgatgcgggcttcgatgccggcatccgctacggtggcaccgtcccggaggacatggttgcccggcgtttatctgccgatattcgctgggttatcgcggcctcccctgattacctggaacgctacggaacgcctgaacatccggatgatttattacaccatcgctgcatcagcaatcgtctcggtgacgatcgggtttatcgctgggaacttgcgcgagacggcgaaacataccaaatgacagtgccaggctcagtgacggtcaatcatgccgaaacgggtctggtggccgtattgggcggggctggcctaatgtattttccggagcctcttgttgcaccctatgtcaaggatggacggctccgtctggtgcttacggaatggtccccactggaggaaggttttcatatctattattcaagccgccggcaattgccgaccgggcttcgccttctgattgagttcatacaggaggccaggccgctggggttgtgaaatagtgcctccatactgaacgatgcgttatcggctttatcgccctgtcgcttattcagaaagctcagttgcaggaagccgcagggagtctgcaaggcgtgctgtttgataataatggagaaacaagaggtaacgctgtgaaaaattacaaaaaaaacatgggttgtagtttatttgaaggctagcccaggtgacccgcatcaataagtgccatacgaagatgtttctgaatgaaatccgctttataaatgctgtatcggtggctgtcattttcacataataacatcgcgctttttttcattaaagcgtactgaatggctacgtcattgtgtttaataaggtaatcacggaatgccaggtgttttatgatttgagcatccccggtggtaaacgcatggatatgatgactacgctgacttccaccttttgtaaagtacctacgatttaaaatgccgttttcaccacgcacagtatatcctacaccctccattgcctgattcaaactgtccagttcttcaagattagcaacttcgattaatatatctattactggcttagctgataatccaggcaccgaggtgctaccaatatgatgaatccgggatatcactttaccaagcgtcatctgcaacagagtacgttcgttctcaaataaagtcggccacatttcatcataatcaactacagtcaatattcgcatgttcaacagtcacaccttttaaggaaatttaagcagtcacaataacataaatcgcctctgctgacttgaaggcatttataatctgtatctgtcctcataattttcaaccatcgtctgacaagatgccctaaacccctttgtagtgctctttattcagaccatacttcttcattctgagataaagttttttacgcggtatcagcagatactccgccacctcattaatacgtccctggtggatattcagcgcttcggtgatgatctgccgttcgacgtcctcaacccgctgatccagcggcgtcggctcgccaatgtgcatcagcggattaaccgtttctgcgagtggtaatacccctactgcaaacagctcggcggcgttcgccagttcgcgaacgttatttggccacacccggcgcatcatccccttcaacagaccagcatccacctccgggacgggatgattcagccgttgacaggttttttgcaaatagtgatgaaacagcggctcgatatcatcaggtcgctttgacagaggctggcagccaatttgcgtcatcgcgaagcagtaatagagttccgccactatctggctgctggcggccaactccaccagcgaagcgctaccgataccaatcaggcgaaaaggccgcttctcatgactctgcagctgtaccagctgatgctgttgctcgtgagtcagatgctcggggtgacttaagaccagcgtcccgccctgggcctgggcgatcagttcattaagcgtatgggcgttagccggagtcagctcgcaggcgataaacggaccttcagcgtgccgtcctaactggtgcaggtaacgcgcgccggtcatgcggccggttcccggctcgccgtaaagccataccgcaatatccgtttctgccagctgctgaaggcgctggcgataccgaaccgtccattggctgcggccaataagctcaacctgtaatttttgctgacaatactggcgacgggcgataaccgattgcctctgacgcagcgcggcgtccaccagcgtgagcagtttgcccggatcgatcggcttttgcaggaaatcccaggccccttttttcaccgcctccaccgccatcggcacatcgccgtgaccggtgataagcagaatcggcagcagatcgtcatcctgatgaaacaacgtcattaaatcgataccggagcagccgggcatgcagacatcgcttaaaacgatgccgggccagtccttcggcacctgctcccgcgcatcaaacggattattacaggcactgacatgataccccgcttgctcaagcagctgcgtataggcatccagcacatcggcatcatcgtcaatcagcagaatcgaacagttattactcaacatcttttacatccgtcaaattgaattccagcaccacgcaggcactgcgtgtaaacgtcgacgccagacgcaacgccccttccatttgcgtcatcagcgaaacacatatcgaaagccctattccgagccccacggttttactggtagtgaacggctttaacagcgaagggagtaaggccgcaggccagccagggccgttatcggcaatcaacacgcacagccttccgccctggatttgccagctcacggtgatttgcgcggcgtgcgggcaggcgtcgagggcattggacagcacgttcaccagcacctgatggacgcgcacttcgtccccctggatccagacagtgtcatccggtatcaccagcgtcccctgctgaggcttatgacgcatcgccagcagttcccacgccacggtaaacgtctgacgcaaatcgaccggatgcagcggcgtttccagttctgcgcggcgggtaaactggcgcagggagcggataatcgcgtcaatgcggttgatcagcccttctgctttgcttaacgtcgtccgcgcctgctccgcctgtccctgttcgatcgcccttcccgccgtaaaaagatacatcgacagcgcgttcagcggctgattaatctcatgcgccagggtggtcatcgtctgccccaccaccgccagtttagcggtctggatcagctcgtcctgcgtggcgcgcagatcggcctcaatcgcttttcgctcgccaatctcctgttccagctgctgtttttgcgcattaagctgacccagggtatgacgaagcaaaccggcaatacgtcccagctcgtcgcgcccgtaaaccggaatggtcgcctcggtccggcccagaccaatctgcaccaccgcctgattcagcgcggtaaagcgtttcaccagccgcgagcgaataaaataatggtttagcccccatgccagcagcagcgccagcaacgtcgccaccaggattaacccgccgctgacccggacaatctgcgccatacgctgattaaacatctgcatctgctggtgactgctgccaagctgggcttccagcagcgttctgaagcgccccagcgtcgcttctctggaccggctggcttccacgagcgctttttgcgcgctaacatagtcgcgcatggtatccggcatattatttttcaccatgccaatttccagcagctcatcaatcgtttgtcgcagggtaatggtgctcggccagtcatccagcgcacggatattttcatccgccgtttttttcaggttttcaagatagcggatatgcgtctccaccagcatgccgtcatcattcccggatttcagttcattgagcctgtcgcgcaggtcgtcaacgatctgattttcaatacgagccagggtatagacctgctgctgttcgttctgcacttcccgggcgcgtttcagatactgcctcgcatccccctgtcgggcttcaatctgatcgagcagcgttccctgttgccaggtaaaatcctgcaccagcgaattcagctcggtggtgaaatcatcgtgcagccagtcgatccgcgccgcaagctctcccaccttttcacgaaccagaaacatgttgtagagcacgcgatccagttccgccagcagcgcgcggctgtcctgcaatatcacccccaactgctggcgttctgccggcgacaacccctgacttagccgttctattttgtccagatgctggataatctggttgcgcagctgcagtcgtaccgtggtatttggcgccagcagaaattcattgagctgatcgaccaccaggttgagattcccttcaatcagaaacgccgcatggatgcgcggaaaatactcatccagcgaatagcggatctgcgaactttgttcatgccaggaatagaggcttacgctgctgacaatcagcgtaagcagcgcccccgtcagaaatgccccgcgcagactgctactgatactgatttgccgcaggcgttgcagcatggacctgtccgtcatttcagttcttccagtttagtaatcgcctgccgctggttgttgagaaaccagagctgccactccatcatctgctgttccgcaaaacttttgttgtcgaactgagccagccaggcttcatcctcgctgctggccggatccaccgggacacgggtgagcagcgcccgtatctcgggtagcggacgcttaagacggacctccgcgctatgcagcgctcgccaggcgtctttgagctgagcaagacgaaagctaatcgccgtatcaaacatccgctgaaccaaacgctgacgtttgaggatcaatcgatagtttaatggcggttgattcatcagcatcgcctgctgcgccgcccgtggattgcctggcgccagcggtgttaccggatacttcccggtattagcgtcggcgaggatcgtctggccctccggacttaacagatagcgaataaaccgccgcgcttcgctggcgtgctggctgtttttaagcactgcgacataggtcggcgaaaccgccgactgggggaaataggtaaaagccaggtgcggatcgttcagtagcagattggcgtaattatcaatcaccggaccagccacgcccaggccgcttttaatcttatctgccaccccaaagctacgggatgaaatggtcacgaggtttcccgccgtcgtcaacagcgtttcccatcctttaatccagcctttttgttgcagcagcgactccaccatcagatggttggtatccgaacgcgacggactgctcatcagcagcgccccctgataacggggatcggtcaggtcatcccagtccgctggcgcaggcagatgccgggtcatcagcgctgagcgattcatcagcaaaccgaacccggagatcgccacggccacggaggtggagcgaatggattccggcaccagatgttggctgactgccggcgcaccgctgaacggcgccagtttttgatgctcctgaagatgctgcagcagcatcggcgacgaagtcaggatcagatcgacattttcggcatttgccgtatcaagcaactgttccagcgaggcgctggtgcggttgagcgtccttatcatcaccgaccccggctctttctgccagcgatcgataatccacacggtggcgctgggagaaaatgtcgtcgccatcaccagctcattgccttgcgccgcacagggtctcagccatgcgctcagcagcagcagcgcgaacattttgctcattatcccgaccccacgaagaaatatgtttgtgatcccgttcataaatattgaaataccgtaaaaaccgcgttgagacaaaacttacccgtttatgacatctggtgaattaatcgccgcgagcggaaaaatagtcaaacgggcgtccgggaatatcgggaaagattaccagataatgattaggcaatttgttagtgtccgcacaagccggacataaaatcagcgcaaaattaattgcgcaaaatctcgctcatgccagatgggtcaaaaacaacccgtccctgcattattttgagtcaattttgactcatttcgacgatttgaattttttagccgcttatttcacccttcggggtaattactcctgatgttcatatcaatataaatacaggtgacgacatgttatcattattaaaaaaaggcccgtcggcgaataaagttcctgctgagaaaattcaggcaacctatggtcgataccgtatgcaggcgctgctaagcgtatttctgggatacctggcgtactatatcgtgcgcaataacttcaccttatccacgccctatctgaaagaacagttagacctcagcgccacgcagatcggtttgctcagcagctgtatgctcatcgcctacgggatcagtaaaggcgtaatgagcagcctcgcggataaagccagcccgaaagtctttatggcctgtggcctggtgctgtgcgctatcgtcaacgtcgggttaggattcagtaccgcattctgggtcttcgctgcgctggttgtcctgaacggcctgtttcagggtatgggggtcggcccctcttttattactattgcgaactggttcccgcgccgtgagcgtggccgcgtaggggcgttctggaacatttcccataacgtcggcggcggaattgtcgccccgatcgtcggcgccgcattcgccattctcggcaccgagcactggcagagcgccagctacattgtaccggcctgcgtggcggtggtattcgccattagcgtactggtgctgggtaagggttcgccgcgcgaggaaggtctgccttcgctggcagagatgatgccggaagagaaagtggtgctgaagaccaaacacggccagaaagcgccggagaacatgagcgcatttcagatcttctgtacctacgtactgcgtaacaaaaacgcctggtatgtctcctttgtggatgtgtttgtctatatggtgcgtttcggcatgatcagctggctgccaatttacctgctgacggtgaaacatttttccaaagaacaaatgagcgtcgcattcctgttttttgagtgggcggcgattccgtctactctgctggccggctggctctccgacaagctgtttaaagggcgccggatgccgttagccataatctgtatgacgctaatcttcatctgtctgatcggctactggaaaagcgaatcgctactgatggtcacggtattcgcggcaattgtgggctgccttatttatgtcccgcagtttctggcctcggtccagaccatggaaatcgtccccagctttgccgtcggttcagccgtgggtctgcgcggatttatgagctatatctttggcgcatcgttaggcaccagcctgttcggcgtaatggtcgataaaatgggctggcacggcgggttctatctgctgatgggcgggatcgtctgctgcatactcttctgctacctctctcatcgcggcgcgctggaacttgagcaacagcgtaaaatcaccgagcaggaagaggcccgactggcactggctgacgcacagtaagcgcctgaacccgggggaacaaagagccagcttgctggctcttttgccgttgatagaggaatagatgtccgcggcggcttccgacagcggtataaagcaagtattcctgccatcactgatgttgctgctgagtggcctacttcgccgggataatcagcacctgacccggatagattttgtcgggatgggtcagcatcggtttattggcttcaaaaatgcgttgatactcattggccgagccatacatcgcttttgagattgcgctcagagtgtcaccggatttgaccgtgtaaaaacgactttccgccccgctttgcgtcaccttaacgccgtcactgacctggcctacgccagtgacattcccgaccgcaaccagaattttttccttatcctcctgcgaagcgacatcaccagtgaccgttgcggtgccatcttccgcaacatcaatattgaccttttcggcgccaggcagattaagtccatcgatatgttttttcagcttttcagcccgatcttctttactgtcgccggagacggcatcccatattttctcgcccgcttctttcacaaaatttaataatcccatctttccatacctccacgactgttacatgaacacatgttcctcggccccgttgacccaatgttcgggatattggttttgatatccaccatcgcgacaactgcttgaggcagcacaagctgccatcaaagtataatcaatgagcgtcaaagtgcaggaaatttgccatggtatggcaggaaagtctgtattccggcaaggcgacacgaaactaaagcggacattatccccccgaacacaaggcacctggcgcagaggctgattgattgtgaaaggatatgagaccttaaatggcaggctgggagttggcaccccgcctgagggctcctgattctggtcgccaatgctttcaagacgtttttcttactgagatcgtctcaaaaacattcgctgatttctgccgcagcagctacagtaaatccaggttaaactggtatgaccacacaaggcgagactcatggaatctgtcatcatccccgtaagccagggcggctttgtcgccgccacgctctggcaaagacacaaagccaaagcattggtgatcgttcacccggcgacggccgttgtacagggattttataaaggattcgctgaatacctttataaaagggggtttagtgtcattacttatgattaccggggcactggtctttcgaagtccgggagagtccgtcacaacaaaaacaccatgtccgactggatcgagcaggacgtcggatgcatcaccgcgtgggcgaaagcccgagcccctggccttaccctgctggcgattgggcacagtattggcgggcatgccgtgctgttatcttccgcctccaccgacctgcgagccgccgtcatggttgcctcacacgcaggcgtgacaagcactatcagccaaacgaaggaaaagctgcgagtatggtgtttactgcgcgttttggggccggcactttgccggctctttgggtatatgccagccagacgtctcgggctgggtgaagatttaccggctccggcgatgcttcagtggggacgctggagcgcgatgcctgaatatttctatgacgacccggggtgggatgcgcgtcagcgggcaggaaagataaccttacctattctggtgttgggttttgatgacgacccttgggctaatacagaagccatctcacgcctgcttgctccagcgcaaaacgcaaaaatagaacgccgtgaaatacggcgggcggattacggactttcatccattggtcatatgggcttctttcgtacccggaatgcggagaaattatggcccctcgtcgcacaatggctggagagacattgcccggataagaggcggacgacctgagcaatatttcaggagacgccgcttccggcgcctcctgttcttcacctcgcggctactcctcgtacgccgcgtgatggaaatcaatttcccactgcagcacctcgccgtaaagcgccgataacgcctgcttttcgtcttcactcagcgccatggcgcagcggtcgagttcgttttttagccagagagcctgctgataaaattcgtcctccgcgtgcatttccacccagcgtcgtaaatcagcatcgctctgataatgttcgctcgcccgtcggcaccagaaatagtacatccattccgcaccgaacatcagggtcacaatctgctcatagctgccctcgtgggcggtccgcagcataccgtcgcgaaagcgccgtaccccgggcaaatcatccgggtactcagcgggatcgatctgccgtgctgacaacacctgttcaaaccacgcgatctgtatatcaaccagggcattcagcacgccaatcagccagcgctgctgttgaatacccggcgctttgctgaccccgagggcaaaaatcgcgattgccgtcgcgacaaagttgccctcaaacaccagatagcggttgaagacgactgtcggcagacgatcctgttcgatatcagtcacaaacgggtgctgctgcatcgcctgccacgccggttgatgttcgcgcagcaggcgttcgctaaacgcttccattatgcctcctccagcgcggcctgcgcgaccgacataaaatgtttcacccgggccagctcaacatcgttccaccagacgccatcgaccttcattgtactggccacaatgaccccctgagtccgcccgaggatctgcttcacgttagccggtgtcaccccggagcccaccaggagcggtagttccgtcgccgcgcggatctcgtcaatttccgccatcgtggcgctatcgcccgtacgctggccggtggcgatcaccgcgtcagcctcgaagaaatcgacatcgcgcgtcagttcctgaatcgaacgatcggcgacaatggcatggctaccgtgcttaacgtggctatcggcaaaaacgcgaatatgttcagcgcgcagcatactgcggtagcgcagcgccttagcggccgccccttctataaatccttcgttggcgatataggcgttggcccactggtttacccggacgaaatcggcgcctcccgccagggcgatcgccattgccgggatcgccgcgttagccagaacgttaatgcccagcggcacagcaaaacgttcacgaactttctcggtaatgaccgccatcagcgcggaggtttcatggccgatatcctcaggtttagagaaaggaatatcgccatgattttcaataatcagaccatgaacaccgcctgaaatataattttcagcatcgcgaagcgcacgttcaacaatatccgagactgattttcctcgatattttggcgagccaggaaatgggtcgcaatgaataacaccaataacagccttgcttcgtgaaaaaatagcttgtattgcattcgttttttctgctgagatagcaaccatcttatccatcctgttaagggaacactatgcgtgtttacgttactggtaatattaccgtagatgaaacctggtccattccggatataccgaaaaaaggagcctccattcacggcgttaaagtgtcgcaggatatcggcggtaaaggcgcgaaccaggcgattatattatcccgctgcggaatagagacgcgtttaattgccgccacgggtaatgacagcaacggcgcgtggatccgccagcagataaaaaatgaaccactgatgctactacccgacggccatttcaatcaacatagcgatacctcgattattttaaatagcgctgatggcgacaacgccatcattaccactacggcggcggccgatacattcagcctggatgaaatgattccgcatatggcggatgccgtcgctggcgatattctgctacagcagggcaatttctccctcgataaaacgcgggcgctgttccagtacgccagaagccgcggcatgacgacggtattcaacccctcacctgtcaatcctgacttttgccatctgtggcccctcatcgacatcgcggtggtcaatgaatccgaggccgagctgctccagccatacggggtgaaaaccttagtgattacccagggcgccgcaggcgcctggctggtccaggagggccagcgtcagttttgtcccgccgtgcccgccgaggcgcttgatactaccggcgcgggcgacacgttcctcgccgtcatgttggcctccgccctgctgcgcggcgtcgcgccggatgcgctggcgctggcgcacgccagtcgcgctgccgccattacggttagccgccgggggacgctcagcgcgtttcccggcagccgtgagctcgccgccctgttaaccacggacggggcgcgctgacctacttaaacagcggacggtatgaatcgacgttcgctttggttaccaccgtcgccggaaccagaatggttttcggcacggttttacccgacgtgatgctgttcagcgcattcagggcttcggcgcccatcttttccgggtcctgctgcagtacggcggtgacgtagccgccgtcaataccggaaatcgccttcgccgtcagatcccagccaaagactttaatatccttctgccgcccctggttttctacggcggcgatagcgccgagcagcgcgggttcgccggtggcataaatcgctgtcagatccggattaccggtgatcaggttttccgccgcggtcatcgctttatcctgcacattctgcccgtcgaccacgttagcgatagtaatcttcggattgcttttcagcgtctcttcgaaccctttctgccgctggttctgaatggccgaattcagcgcgccgactatacccagtcgcgcctggccgcccatctctttctgcacgtagtccacgaagtattgaccgataattctgccgccttcaatattatcaacgccgacctgagctgcctgtggcccggccggtaatacggcatcaatcgcaatcaccggaatgtttgcggcggcggcttctttaaccgctggcatgatcccgttaacgtcgatagcagcaaccagaatgcctttaacgccttgctgaatatagttttctatcgcgtcgttttgcgccacgggattatcgttagagttaaaaataactaaatccttgccactggctttggccgcatcctgtgcgcctttattcatcagattaaagaacagcgcctgttggttgatttgtaccagcgcataagtcggaccggcagcgctggcggcagaaataaaactcatggatgccagcatggtcgtggcgacagcaaggaaacgcagttttccggtgtgaaataacatcatcagtatcctcgtcgggaatagttgatagccagcagagttccgcgccgcatgcgaacgcagaaggattattttttttggcgggcaaatatcgtctatatcgccagaacaatcattgaacgttcggcggatacctgcttaatgtcatcccggcaaccggtccgtgtcggtgcgcgactggaataacttaaacggggttgggaatgacttcccggataatgcggtaaactgcctatacaattctctgctgattaaaatttgtcaagcatttatttttggtgattgttcgcagagaaattgctgtatccaccgcgcttaactatgttacagatagccgattctggcacaaatggcgcaggaaatgagtataaaacgtgtattgttatccgatgtggcaaagctggccgggctgtcgaaggcgaccctgtcgcgctatatgaacaacagtattgtgctgccgcaggacaccatcgaccgcatcgaaaccgccattcgcgaactggactatcgcggcaatagcctggcacgccgtcttagcaaaggcggcagcgaaacgcttggcctggtgcttcccgatattaccaaccccttctttgccgaactggccgacgcagccgaagaggccgcttctgccagcggctacagcctggtgctgtgtatcacccgcaacaacccggaaaaagagtgccagttcattcgctggctggatacctgccaggtcgacggtctgctgttcaccaccaaccgccccgataatggcctgctgcgcaaggaagtccagcgtcacgaacggattgtcctgctggatgaagatattcccggcagtaaggtaccgaaagtgtttgccgataacgtccagggcgggcggatcgccaccgaaaaactgatcgccgccggacatcgccatatcgctttcgtcggtggcccggacaagctgatgagcgtccgcgagcgctatcagggcttttgcaccgcgatggagcaagcgggcctgagctggccgcccgaatgggtgatgtatggcgactaccagcgcgagtttggccagcaagcgttgcggtacctgttcagccaacaggttcgccctaccgccgtcttcgctgccagcgactatctggtgctcggtctgctcgacggcttgcgcgccagtgggctccaggcgccagaggcgctatcgttagtcggcttcgatgacgccaactatgccgattttacccagccgcggatctccactatccgtcagcccgcccgcgaactgggccgcactgcggtgaacatcatgatgcgcctgctaaacgacgatccggatatccctgcggaaacccgcctgccggttgaatggattggccgcgactcgatcaagatttgttaagcccgtcccaaaatggcgcaaaagcgcccgcttttggcgcaaaaaacgatcaattaacaatttattcactataatcagtaaaccggtttaccggattgtattcaattaagtgtattgaatacataaggttaagttacagggctgctgtgtggttactgccctggcacggatgctgcaatgttcttactggcgaacaaatatcttacatagcgtttgtcctgactgcactggcgagtgctctggtccgcaggtaaaccggtttactagattgtaaaccgtgtcggatagagtctctcccgcaggatggcgaacattttcccggccacagcgatgggagttatcagatgcagcagccacaaactaccccgccaagggtagagatgatcaatatcaccaagacctacgggtcgatacgctcattgcgcggagtcaaccttgagctggccccgggcgaagtgctgggcttagtgggcgataacggcgcggggaaatccaccttgaccaaagtgctctctggcgcggtgatcccctccagcggcacgattcgtatcgacggtgaacagcaacagtttacgaatccggccgattcacgccgttgccatatcgagatggtctaccaggatctgtcgctctgtgacacggtcgatgtcgcgggcaatctgtttatgggccgtgagccgatgaaatcggtcctcggcatcccctttctcgacgaggccaaaatgcacgccgatgccagagagatgcttaaagggctcgggatctccattccggatacccggctgctggtgcgaaatctctccggcggccagcgccaggctatagccatcgcccgcgccgcggcctttgacccgaaagtgctgattatggatgaacccaccgccgcgctggccgtcgcggaagttgaagcggttctggagctcattcgccgcgtttccgctcgcggggtgagcgtgattctgattacccaccgcctgcaggacctgttcctggtctgcgaccggatcatggtgatgtatgaaggtaccaacgtcgccgacagacgggtgtccgacaccagcctgagcgatatcgttaacctgattgtgggcgaaaaattcaccgcccgctctgcggcagcacattgaggtaacaggatgagtatcatgaatttaagcagctcacgcatgatccagcattcgctgccgcgccgcctgctgcataaccattcaggcgtagtcagcatcgcgctctttttcgtcttctgctgcgtggtgttttcgctgatcaccagcaactttctcaccggcaccaactggctcaacattatccgtcagagcgccccgctgctgatcgtcgcgacggcaatgactctggtcattaccaccggcggtatcgatctgtcggtaggctccaccctggcgctggtcggcgcgctctccgctatcgccctgaatagctggggtctgccgtggccggtggtactcctcggcggcttgctgctaggcggattcgttggcgccatcaacggcttctttattgcctatgaaggcattccggcgtttatcgtcacgctcgccaccctggccgtagttcgcggcatcgcgctgctggtcacccagggctactcgattccggtaccggctgacagcctgtttacctttatcggacgcgcgtgggtcgtcgggatccccatgcccgcactgctcggcattctgattctgctgatcgggcatatcgttctcaaccatatgcgctttggccgctacgtgaccgccatcggcgctaacgccgaaggcgcgcggcgcagcggcattaacaccaaagcggtcaccatgaaggtctatatcatcagcggaatggccgccgcgctggcggggatgatcattaccgcacgcctcggcagcggctcctccaaccagggcgaaggctttgaactgcaggtcattgctgccgttgtgctaggcagcaccagtctgtttggcggcttcggaactattattggcacgctgctgggcgcactgtcgattgcggtcattcagaacgggctgatcctgtcgcatatttcgccgttttacacccagatatccaccggcaccattatcctgctggctatctggctgaacacccgcattctcaacccgacgcgctccgcggcaaaaggatagctgatgaaaggttcaatttttcgccatccctccccgctgccggttggcgttagcagcggttatgtaatgactgtgcttggcccactgccgattaacgaaatgggcgttactctgatgcatgagcatattctgctggatgcctccggcaaatgggtgccgccctgctgctgcagcgatcgccatcttgccgaaatgccggtgaaaatggaaaaccttggcgaactgtcgctcaacccgctgatgagccgcgataactgtcagctgtttgatgtcgacgttgcgattgacgagctgactaaatatcgcgcccttggcggagaaacggtagtcgacccgaccaatatcggcattggccgcgatccgaaagcgctggcgcgcatcgcgcggctgaccggtctgaacatcattatgggtaccgggctctatctggaaccttcgcaccctgagtgggtaaaaatcagcagcgtcgaacagctgaccgaacggctgatttacgatcttggcggcgcggaggagaaaccggaggtgctcgccgggctcatcggcgaaatcggtatctccagccgctttacgccggatgaggagaaatccctgcgcgctgcgggtcgggccagcgccgcgaccggcgtgccgatcgaggtccatctgcccggctgggagcggctgggccatcgggtgctggatattctcgagcaggaaggcgccgatttacgccataccgtgctgtgccatatgaatcccagctttgccgataagcgctaccagcgcgaactggcgcagcgcggggcgtttctcgaatacgacatgattggcatgagctattactacgccgacgagtcggcgcagtcgccctccgacgaggagaacgcccgcgcgatccgcgagctgattgacgacggctacatccagcaaattctgctgtcgcaggacgtcttcctgaaaaccatgctcacccgctacggcggccacggttatggctacatactcaagcattttgttccccgtctgcggcgccacggcgtcagcggcgaacaacttgaaaccttaatgattggaaacccccagcgggtctttggcggataaaaggaaacgtcatcatgcagaaaaaaatcttactggtcggtgagtcctggaccagcacgtcaacgcacgttaaaggcttcgaccagtttgccaccgccacctggcacaccggcgcaacggactttctggccgcgctcgccgacagtccctatgccattacctatatgcccgcccacgcggcggcgaccgactttccgctgacgctggaagcgctgcaggagtgggatgcgattattctctcggacattggcgccaatacgctgctgctgcatccggacacctggctgaagagccgccgaaccgccaaccgtttaacgctcctgcatgattacgtggccggcgggggggcgctgatgatgatcggcggctattacagcttccagggaatcaacggcggcgcgcgctaccgccataccgaggtggagaaagtgctgccggtacgctgcctggcctgggacgatcgcattgaaaccccggaaggctgctatgccgaagtgacggagtctcaccccctgtttaacgatattccgggcgaatggccgtggctgctgggctataacgaagttgaaatgcacccggaaggcaaactgctggcgaccgtggccggtaccggtcatccgctgttggctgttcgcgaatatcagcagggtcgctcgctggtgtggaccagcgacatgtcggcgcactggttgccggaagagtttgccaaatggcccggctatcgccagctgtggattaactgcctcgactggctgacggaacgccgctgatgaccgcgacccttgagctcgcccggcagctgctgggctttaacaccatcaacccgccgggcagcgaagccgactgcatgcggttcttcgccgactggcttgacgatagcggttttgaggtttcgctgtcgtcgttcggcgaaggacgctgcaatcttatcgccagcctgcccggggcgaagagcggtaaaccgctggcctttaccggacatctggataccgtcccgctgggaaatgcccgctggcagtacgatcctttcggctcgcagatggaagacgggcgtctttatggccgcggatccagcgatatgaaagcggcgatagcggcgtttgccgtcgcctgcgttcatcagcgggaagcgatcctcgccggacgcggcgcggtattgctgataaccggcggagaagagaccggctgcgacggcgcgcgggcgctgatcgcctccgcaacgttgccggaggtgggcgcgctgatcgtcggtgaacccaccgccaactatccggttatcggccataaaggcgcgctctggctacgctgcgaaacgcgggggaaaaccgcccacggcgcgatgccggagctggggatcaatgctatctatcttgcggcggatgcgttgggtaagattcagcatttttcgccaggcgcgccgcatccgctaatgaagcaacccaccctcaacgtcggacgcatagaaggcggactcaatattaattccgtaccggaccgcacgcgttttgatgtcgatatccgcagcgcgcccaatttacagcacgccactatccgggagcgcttgacgacgctgcttggcgaaagcgtcaccgtctccacgctggtcgacctgcccgccgtcctcagccgggaggatcatgcgtggattaagcaggtttatcaacgctgtcagccgctgcacgctgagccgattgcgccgcgcgtggtgccctactttaccgacgcctcgctgctgctgcctgcattgggcgatccgccctgtattattctcggccccggcgagccgtcgatggcgcatcaaaccgacgaatactgcctgctcagccgactggcggaggccgaacagctatacggtgacatcattcgcgactggatggcatcaccgcccgcgacgaaagtaaaaaatgagtgacactgtcactgaaagcgcgtgccatgcaattcagcgtttgaataatatcgcggaataacagaggataaccgcctcgtacacgacggtatcaccaccagcaaggaggcttagcatgtccgtgaaaaccaacgctgtgctcgtttgcaccctctctttactcctttccgcctgctcgggtcgtgcttctgcgccgggcagcgccgaagacgctaaaatatcggctgaagtggataagatacttcgcgattatcaaacgggttccgatacttcaccccaggccaatgcctcacgctatctggcacggatccaggcggctatcttcgctaacatagaccagccggcctcctggcaagggcaaaaatgctcggtgcgctttatgctgcagcgtgacgggacggtgcaggatccaacggtcgagagcggcgatcggccattctgcgcgcaggtgatgtccgcgctgaaaaaagccaacatcccgcccgcgccggacgaaaaaacctatcaaaccttcagtcatgtcgtgctggacgtgaagccctgagcttgcccgcagaaatggccccggccatcaccagggccatttcgaacaagataagctgacagccctgcttaacagacgctttttggcgatcagcgaggaatgattcaatagtaacaggctggcgcaagcctgttttttttccattcttcaggatcgtggccgggtatgaataccgcatgatatcgctcggtaagctgacgcagctttcgcacagactgagcgacatcagtagcagacgtcattagccccgggagcgccttctcatggtaatgatctaaggtataagccgcatcaatcgctagcgtaaaatttgtaccacccggtaagcggataagaaaagattgatggcccggtgaatgccctggggtgaaaatacattgtaacgtgccatcaccgtaaaggtcatagtgatcatcggacaacccgttcagaaatagccagttaagttggggacgatcgaaatcgcgtcggcaataggctcccgaagtaaaccagtcaggggcaaaggcatattcatactcttgcctctggacaacatgcgtagcatgggggaagcgaccaattgctcccgtatgatcagagtgcaaatgggacaggaccacatagcggagatcctcaggagcaatgccaatcctcttaagttgttccacgcaaccctgttcttctgacatcaccggtttaaactgctctacagcacttccccaataaccgctgggatctttcaatccttcgacagccagaccgccgtcaatcagcgtaaacccatccggatgggtcagcagaaaccaggggacagggatctcataatgctctcccacgccctgattcatccggatatgctgatatcgacaatgctgtgttcctgactggaacatgaaaagctttatctctggcatcattattttccaccaataaatcaattaaatagattgaaatttagcctgactcaggccttgagtctggatttttcatcatttcgcagtaaagcagtagatacctgtccccacttacatttatcggtaaagccaatataattggtgaatggatctcttctcagcaatgcgcatatttatcagggtggttgaacggggcagcatgtcggctgcagcccgcgatctcggtattggccagcccgccgtgagtgaaagaatagaaaaactggaagctcatcttgggacacgtttgcttaggcgcaacacgcgtaacatgtctctaacgcaaagcggtaacgtgttttatgagcgaagcaaaacggccgttcaggcggcagagcatgctctttctgtgaatgaggaaaatcaggggctgcaaggcaaaatccgtattgccgcgccctattccgccggagaaagcctgctgatgcctgcattgttgcagcttcagaacgagcatccggagctacaggtcgatgtcatttttaacgaccgcgtcatcaatcccgtcaccgagggggtcgatttatcgctgagattaggtgatgtctccgaaggtttttttgtcgcacgcccgcttggcaccgtgcgcagagtgttactcgcctctccggctctgctggcgaaaatgggtcatcctgacacgccggatgcgctgacagattatccatttgctgctgtttccggtgtattcgccagtaatcgcattcaattggtcgcttccgaagatcaactcattaatgttcccgtcaatattcaatttcagtccacgcactggcggagtgtcctctcctggttattagcgggacatgccattggtgttttgcaaagtccggtttgcagaaaagaaattgcagacggcgcgctcatccccctcttaagccactatccgatcccgccatttagtgcctggttgctccatccaccagctgggatgatgtcgtatgaaacgcgaatttgtgcctccctgctggagggctatatcagagatttgttgcttgagccggccggctgaataaaacagcgctgccctggcgcgctgaagatggcctcttgttaatgactcaatctctgatgcatgaaatcaataagcgctcttgtttttgccggcaagtaacgccgatctgaatacagagcgaacaattgcaagggggctgccgattgttcaaattcaatctcgattaaccgcccatcatcaatatagggttggcaggcttgtttcgacaggatggcaaaaccgacacctgagatggccgctcgccctgccatctctccgctgttgacccgataacgaccgttaaccttgatcgtctcgaatccgccctttttattcacaaactgccagggagcgcctttaagcgcattcaccgttgtaatacagggtaactcttcaaattgctgtattcgagaaggcgtgccataacgctggatgacggagggggccgcaacgatggtgcaagggatcgtcaccagatgacgggcgatgtagtcactgtcatccatctgaccacggctaacaatgacagctaaatccagatcatctcgcagggattcataacccgacaaatttgtgacgcaacttatctccagatccggatgctgacaggcgaaatcagcaacaacagagcccagcaatacaggaccgatttcattgggaatacagatacgtaatggccccttgaattgcatttgtcgcaacgttaattcggtttcagtttgctcaagtgcttccagtaatggcttcgcccgggtatagagtagatgcccagcctgtgtgagcttcatatgtcgggtactgcgctcaatgagctgaaggttcagtttgtcttctaactgagaaatgcaacggctcacatttgatgtcggcatttccagggctttcgatgccccgacaaaactgtctctttccaccacagcaatgaagattttcagcgcattaaagtcaagaactgaccgcatcaactatcccacatatgataataatgagtgccatttttaccatctaatcgacaagtttgatagcagttaagctaggatatctttcatccacaggtcgcttgctatgccactggtcaccacaacatttaatcaaaagacgctcattcggattgctatggtaatcgcttttgtgcaatttactaatgcgctggaatatatgatgttcagccctgtttttacatttatggctgcagatttcgctgttcccgtcaccttctcaggctatgtatccggtatgtacacatctggagccgtcctgtcgggaattatcgccttttactggattgatcgttgcaataagaagcattttttaatcgctaatatggtactgctagccatggcgacactgttgacgacattcactaccagttttcctcttcttcttacattgcgcttcttcgcaggactggttggcggtacgacaatggctgtggggatcactattttgataaaccacacaccggctgacttgcgcggaaaaatgttggcgacggtgattgcgtcattttcgatggtcagcatcgtggggatgcccgctgtactatttttgtgtactcattacggttggcatgtcgcgttgtggttaatttgtacactgtgttggttggcattgccactgatcgtctccatcatccctcaggatcccgtcactttcgacacgtcccacgcgctgcccctcgatgtagatactttactgtttgcttccggtaatgcgctggtacagtttagtccaatgctgatcattcctgtcctggcgccattaatgacgcagctgttgggggcttctcaaggtctgctgccctggttgttcttcggcgggggcctggcggggtatctgtctaccagaatgacaggcgcattaacctctcgtgtttctgctttgagtttggcgaccgggtcgaccctcgtttttatcctgagcttactgatacccgtgatgggctatccgcatccagcgctatttattacgttatttctcggcgcagcttacagtcgtctggtgtcatcgtcggcggtgacgattcagtttcctgataacaagcaacgagcgggattctcttcattacagacatccatgatgtatctgatgacaactgccgcatttttcctgtctgcttttttgttacccgaccatcgcatggcgctacaaaatatggatacgctgttggcggtatgtgcaattaccgcatcaggaaccccaattattgtcatcgttttgcaaaagaaactggctaaacgtacgttcgagcccgatcgtttcgccactgagtagtactccacgggttgctcattttttaaggcaaaaacaggggcatacgcccctgcgtgactaccgccgactcatggccagcttcgcggcaaacaacagaaacaggcagcctgtcgttcggtccatccatttcactacggccggttttttcaggatgcctgcggcatagcgagtggcggtaatcagcgttaacgaccacagcgtccctatcaatacatggatagcgaccaggagaaaagtccagctcacgggtgaatgcccggcggggataaactgaggtaaaaacgaaacgtagaaaacacccattttgggattaagcacattccccagcatcccacgcagaaaccagttactggtggtagtggattctgccggagtggtgttaaattgctggcgcgggcgcagaagcaactggatgcccagccagcaaaggtagcccgctccgcaccatttcaacaaggtataagccaactcagaaaccgccagcagcgcccctaagccaaaggccaccacggcgccccaaataaagcatccgagatcaatgcctaacgcggcatgcaaggctttgcgtccaccttcagcggtcgccgtgcgcaggatgagcgcggtatcgagacctggtgtaagagtaagcagtgtggcagcgagggtgtatgcaagaagtgaatcagtgacgagcatttcctgtctccgaaagagacaaggctactgaagggttcacatttttgcaataaaattatttcccctgatcttctgcttaccctgctccattttacttcggggatggcagatgcaaagggtagcccatgactaagtaatgcttagtcatgggctgatgttgttacaggaagagcttaatgttgatttaaaataaccctgggatacgttagctcactttaatatcatccaggtcgatatcctcttcttcgtaatcattatcaacaatcacgtcgcgagggatatcttttttgatgacggcatagaccgtggcggtaacaacgatattcaccagcagggccatgatgcctgccatcggatgtgacatcgtggggatcatcaatactccgccaaaaggaaccgtcgcatccgcaccatagaccatggtgaccgccccgccgcacgcgccgccgatagccgccgccgcgataccgcgcacaatatcattcatgacgatcggaatagaaccctcaacgatattcacaatccccatcggaaccgctgattttaaggtttccacttcttcacggttatagatatttttacgcagcagtttggcaataaagaaagccaggccaaatccgataggcgtagcggtgttaactaactgaagcgcggtaatgggttcatttatcccctgcgcctgcagggtcagcacgaaagcaaagcatgtcttatttagcgggccgccaaagtcaacaatacacaatgcgcctatgactgcgcctaacaccaaattcgacgacgtgcccatgcttctcaggaaagacgtaagcgcttccgtaaagataccgataggcgtaccgatgatatagaccataatcaggcagctgataatggaggcaaaaaagggaacgatcagcgtcggcatcaacccgcgggcccagtcaggcaccttgacgtttttaatgatcgccagcgcaatataccccgcaatatagccaccaatcatcccaccgataaagcctgcgcttatggtattcgccgccagcccgacgacaaatcctggcgcgatgcctggtttgccggcgatcgagccagatattcccacggcaatcaccaccggcaacagcccaagcgccttggcgcccagggtggccatcgcctgccatacatcaaattgtcccggagttaacgtgtcctgcaccgttccgccaagccccatgccgatggcgataataaacccagagccacagacaatggggatcagaaacgagatagcggtcagcagatgtcctttagggtttgctgcttgccatatttgttttagagacataagtcacgccctttaatgtagagtcgccaggccgaaataaaattatgaattgactatttcactgagtttttcaatcaacttattgggggatttgactgccgtttccgtcgcgactttaacgactttcttgccggcaaatctctcctcgcccgttactttgacatcggcagcaagcaggacaatatctgccgcagcaatctcatcagcggttaacgggttctcaatgccgatggttccttgcgtctcgattttaacgttatgtccggcttttttagccgcagtttcaattttcttttgcgcaatataggtatgtgcaatccccaccgtgcaggcggtaacgccgacaatattcataatgtttctccgttaattaatttaataaattacaaatcgatattagcaagttggtattaagcatcggcgttttcagtttctgaattgaaaagcgcaatgattttatgtggatcagattcaacaagtaatttagcgataatgtcttcatccgccagtgacccagacacttgtgccaacaggcgaatatgggtggcattctgatccaccaggcaaaccgcaaataaaataacacagcggacatcgctgccatccatggtctcccaaggaatggcatgttgcgtgcgtccgatggctaatgcggtacgggaaacaccggaagatttaccatgtggaatagcgatatggttttcaaagccggtagagcctagctcctcgcgtaaccagacatcacgaataaagtcttccttattggtgacggcgccatcctggataagtaaatcggtgagttcttctatcacctcttctttggttctggcggtcatatttaacttgatgtttttaacattaagcactgtcgaaatatccatgattcacccgcattcatatagagttgtcgttaaataacaagccagcatcgctggcgtgatgcagatcttttaaggcttattcaaatacacactgtggttcgaagagaaataacccgttatgcagcgacagtttcccgttggaagatctcgatcattctgtcccacgcctggctgacatcctcatggagcgaaaacagacccgatgtgccgacgataaagacatctaccccggattcagcaatctgaccgaaggttttctcattgcaagagccatcaatttccgtcagatagtgatagccattatttttgcgcatgttgatgagctttctaatcttgttcagcgactcaggaataaacttttgtccggcatagccagggtcaaccgacatgaccgtcactttatccagcagatgcgcatattcggcaatgctttctgccggtgtcgccgggttcagcaccaccccgcactttttgcccgcatccttgatctgattcagcaggcggaatattttgttattcgccgtctcgggatgaaagctgatgatatcggcgccggcctcgagacacatgggaatgatatcttccggatgattcaccatcagatgaacatcaatgggcacagtagtaatttttttcagattctcaataaaaaagggagacagtgtgatattgcggacgtaattgccatccattatatcaacatggtaaaaatccgcttttttattcattgccgtgatctgctctttgaactgcgttaaatccatgcacatcagtgacggtgaaaatttagcgctcataaaccacctccgataaatagttagttaaacattgcgatgatatgacccagcacgatgccgacaacgccaaagtctgcgtctccaaaggttgtggagcccagtcccatatcccccatcatgggcaagagaatggcaggcaggaacgaaatgagcagaccgtgagcaaaagcccctaccaccgccccgcgacgtccgccggtaatgttgccgtaaacccccgccgtggccccgcagaaaaagtggggaaccagccccgggacgatgacgctcaagccgaacagcgggcagaggaacatactgaccagccctgcgacaaagcttgcgaggaagccgacgatgacggcattcggagcgaagggaaacaccgtcggacagtccagcgccggcttcgcgtctttaaccagtttgtccgcaatccctttaaacgccgggacgatctcggcaatcaccatccgaaccccggcgaggatgatataaactcctgcagcaaacgtgagggactgaataatggcgaagataataaagttctgaccagcgctcagggtctcctcgacaaaggatttgcccgcaacgagcaccagcaccagaaacagaatcatcatggtgagagagatggccaccgatgagtcgcgaaggaaattgagcgacttaggtactttgatctcttcaatcgagggactacctttaccaataattttgcccaccagcgcggacagcagatagccaatagatccaaaatgcccgagcgccagatcgtcggtgttggttattttacgggtaaacggctgcaagatagccggggagatgaccatcatcgcaccgagaataaccgccccgatggccaccacccatccccctgacaagccccctacagacaggataaccgccagcatcgcagccatataaagcgtatgatgtccggtcagaaagatgtactttaatggcgttagacgcgccagggcgatattgatcagcatgcccaataccataatggtggcggtttccgtgccgtaattcttctgcgccagagcggccatggcatcagtgttgggcaccacgccctgaatatggaaagaatgttcaaataactggctaaagatggttaacgtataggctataataccggcgccggcggtcaatatgacaaaacccatgatggttttcagcgtgcctgaaataacgtctgaaattccttttttttgcaacagcagaccgatcagtgaaaataaaccaaccagtatcgccggtgttcctagcacatcataaataagaaaatgaagcatgtttaactccacgaatcagatagccgttgcttaaatgttttctgctaaaatttctttaattttattgttatcaagtaaattacttaatccaacgacctttgcagagtgactgctaagatgttctgcaatgtctttggcgctgagaataagatcggcagtttcgctttttgccgacgtcaggtcggtatgtgcgacttcagcttctttattcatttcggcaaggatctttttgacattcatttcaacgatgaagctgctgcccaaaccattaccgcacacgataagcacttttttcattctgttttccttcagtcaataacggcctgaatcgccttgctatcatcggcatttaacaatcggtgtaacttttgctgatcgctaaagatttcagccagttcaccaatcatcgtgatatgttcatttccggaacgagcgcatagtatgattaccacgtttaccggatcgttctctgtcgagccgaacgacaccccttctttaatatgaagaagcgataatccatttcttaacaccccctgttcaggacgggcatgaggcatcgccaagccgggagctaatacgtaatagggcccaagttctttatggctttgcaaaatcgcctcaatatacgacccggctatatacccttgcatcagcaagggttctgctgcaagtcgaacggcattttcccagctatctattgagttaatgactttaattttatccggggttaaccagtctctgatcatatgctctcccgagggggtctatgtgctgcactataaacagctaaataaaatgcaactgtgatacacctcccaaagttagcgctaacaaagaaaaatgttaaaaagtgcgttaccgctaacactggctataatgtgctttccccctcgctgtggtaagttataatgcgattcgcagatatactttcgttatattttatttttcaaacggttggtgattttggtgaagagtttagacgcggacggtagcccgaaagaaaaacgacgtaaaggaacgggtaagataaccctgaccgaggtggctgagtttgtcggtgtgagcgccatgaccgtctcgcgagcgctgagaatgcctgaaaaagtgaatcctgagcttcgcgatcgcatcgatgcggccgtcagtcaactcggctatgtccctaatctgcaggcacgtaatctggcgtcggtccattccgatcttattctcgccgtcgttcccaccttctcttcgccgggttttttgccggtctctgaagcgctgcaaaaagtgctgaccgaacgcggatataccatgatgtttatggaatccgggcatgacggtcaaagtgaacaaaagacgtttgaaaaaatgctcgcctataacccggcggccattattcagttcaatatcgataccattgagagctgcacccagctgctggccaacgtggatgttcctattctggaaattggcgcgctaaatacccaccctgtgggtatgtgcatcggcgtggattacggtaaggccgtaaaacagatcgtgactcatctggccgacgcctcattaaaaaacatcgcactgctctgtaccccggctaataacacaatgtttcgccagttgctgagcggttggaatacggcgatgctcgctctgaaccgctccccgcaccgggtggtaaccactcatttgccatccaccatcgccacaggcgtcaatatattcaaggatatgatgattacctggggcgatctggatgcgttaatttgcacgtcggatgaaatggcctgtggatgtatgatggcctgccacagtgccggcattaaggtgcccaataccgtagccattgcgagtttaggcggaggagtgttatcgacagtctgttcccctgccctgacaaccgttgagtttccctggcatgacattggggtgaaagccggtaaagctcttctcgaactgcttaacgataagcctggtgaaaagttcattgaaattccgtcagtgctcaaagtccgggccagtaccgcggcatgagtttaatatagggcgataaggcttcccctatctagtatctgtgtgtggtagccagggtttctaccaggaagaatgtctctctgcgagagtccatacaataaatgcccagctcataaagcaaaaaatagtcgggacagtagcgttttttcgctactaagcgggtaaaccgccagcctcatttcccgtttatcttgccagccgccccaggcggtgatttcgtagcctcgacccgcctgggcggctttgcactgaagtccgtctagcgccagtccaggatatacgatgtctcctacgccagttagcaggtaaagcgcaccgcgataattcatttgcaccgccctggtgccgcacattcaccatgccgccccccgtcagacatgccctcattacattaaccagttgaatataaaaaattattttatatggcacgtttaatgctcttcgcttgtataccgcaatgtggacaagaacgtatgccatatggccacaacaggtcgccagtctgcggtcgcaaccttcccctttctgtgaggcatccagggtggatgcgtttcacggaagcctgcttactgaaaacggagaacaacatgacgacactcagcgaaccgttggttaccccgaaatatggcaagtggcgccagctggtgctgggcctgatctgtatggccgccatctccagtccgcaatatgtctggacgctgttgacaaaacccttggccgccaaacttggcgtcggtctgccagaattgcaggtcaccttctcgctgctgatcatcctgcagaccttcttttccccttttcaggggcggttagtggaaaaatttggcccacggcggctgatcgctattggcacagtgatggcgggaatgagctgggtgctttccgcgcaggtgaatggcctggcaacgctctggctggtttatggctgcatgggcggcctcgggaccgggatcgtctacatcggtgttgtcggcctgatggtcaaatggttcccacagcagcggggatttgccgccggcgcggtggcggcgggctacgggatgggggccatcataaccaccttccccatctccctgtcgctgaccactaacggccttgaacatacgatgacgactttcgggatccttttcgccctcgtcggcttcctcgccagtcaggggctgaatctgccgccgcccgctgtctcccagcccgtcagtcagacggtggcgcagagcagcagatcgtttacttcccgggaaatgctgcgccagccgctgttctggctgatgttcgtcatgatggcgatgatgtcgacttccgggctgatggtcacttcgcagatggcggtgttcgccgaggatttcggcattagccaggcggtggtgtttggcatggcggcgctgccgctggcgttaacgatagaccgctttaccaacggcttaacccggccgctgtttgggtttatttccgaccgcttcggccgcgagcaaaccatgtttatcgcctttgcgctggagggggtagcgatgatgctctggctggcgtgccgggaagatccgctgctgtttgtcctgctctccggggtggtgttctttggctggggggagatcttctcgctcttcccgtcgacgctcaccgatacgttcggcagcgaacatgccgccagcaactatggctggctgtatatttcgcagggcatcgggtcaatctttggcggtccgctggcggcactgctctatcagtacactcacggctggcatgtggtcttcagctgcgcgattggccttgattttgtcaccgccgccctcgcgctgtgggtgctaaaaccgtggcgcgcgcgctttatccgccagcatagctaatcgtccgccgggcagaagtgacggctcgcccgtcacttcactgatattcgctacgcaacagcgcgtacaggtactcatcgccccactcgcctttaaaaaagatattctgccggtaatgcgcctcgcgacgaaagcccagcccttccaggagtttgatcgcgccggtattgcgggtgtctaccaccgctgtcagccggtggtgggctaactgttcaaagagtaaggccatcaccgcccgcatcgcttcccgggcatacccctgatgctgatacgtcggggaaaaggtcatccccagttcagcctgtctgccttgatcgaaaaagtggatccccacatctcccgccagcgcaccgttggcctggatctctacggcaagctggaaccaactctcatcctcagcaaagcccagcgaacgctgttgttcatagaaggctgtcgcctctgtcatgccgtagtgggtccagctctgaaagcgggccacctccggcagattgcgataatggctgaaagacggcagatcttccgttctgaaccggcgcagcagcagccggggcgtggtcaggggtaatttcatctcttctcttcttctcaatgagacaggcaatggcggggccatcttaacctgcgcagcctcaacccagtcatcgcacttccttgtcaatttaatataaagttaaatttcgatattaaaatttcacaaaccgataaaacattacaataacaaatacgaaaaacaggggaacaagccagagaggcgtctctggaaaaaagagcccttgcgccacggcgaagaggatggtcagtacagctgggccataatatgaaattaacgacctgaatattcttcgcagcaatcttttaataagattcatcatagttatcggatcatcctggtaatgatgtctgtaataccctcattcgatgcctgtcctgctgtaaccgtctcagacttcagaaataatgcctatcagaaagtacatcattcacagcttatgtgtataaaggtccgaataatacgccggttcagaaacataaggacatgacttgtgtatgtctacgcaatcttgtttttattgagggaaccgactccgcataaaccgcggctgatttactttttgcccgtctggcggcaagatccggcataatgcaccgctgtcgcaggacggccgtgtcaccggcaatcgtgacagcgaaccattcgacaggaaaacgcatgaagccaaaacaagcggacattctccgccacgccagcacgctgtttaatcgcgaaggatatcagtcgcccagcatcgagcggattgctgaacatgctggcatctccaaaatgaccttctaccgctattacgccgataaagaggcgctcattctggctatcctcaagcagaaagagagcgaatttatgcaggatttggcgcagatcaccgcggataaagccagcgcgcgggaaaagctgttcgccgtgttcgactactaccatcgctggtttacctgcgaaacgttccacggctgcatgtttacccgcgcgctgtttgaatatggcgcgtcatcgccggcgatccgggagcaatgctcccgatttaagtcgctcctctggcagttcttccgcgatatcctcctgcaggtgttaaaaccagagcctgccgagcgggtcgccatgatgatggtgatgctcatcgatggcgctatcgccgcccagcaggccgagtccgccgaatgccgggagatcccgccagggatgaccgcctggagcgcggccaaagcgcttatttactcagaaggcggtacgctgtgagatgataagctgccgcccagcgactgcagggccgccagcagaccatcatagtaatcgttgcaggtttgcagacgcagcgcggcgccaaagaagacctcctccatcgccgccggatgttttttgccaatcggcacaatcacattgttcagccagccgtccgcatgaccgatgtcgaccgtgatatgttcggcatagtaatgcacgtcgcgctcggaaagcccaatccgccgacagcccgccaccagtttttcatactgcggcgggtcgagcagctcggtcatcgccatgacccccagcgatttgtaataatgctgacggttaacgccgcccagcataaaggcgttatacccggccagcccctgccactcgtacaaatgggcaaaatgattgtccggcaaagcgatattccgccgcttcagtaaatccttatacagattaacgtgggtgatctcggtgctgccctggcctatctcatcccacagattttgcgcaatctcagcgcgggtttccggcagcgagcccaccagccccatcgccaccagatcgaagaaaagcagattgagggcgctgtcgcttttgaagaaatagtcgatttgcgccgcagaggcctcgctggcaaggaaatcgaacagcggatgatgagacgccgggtgctgctggcataaggcgcgcagttcgtcgacgatattgccggcgttaagcattggtctctggtggtggaagcgtttgctttccgcccgcagccactcagactcgatgtaatttctgatcccggaaagcagcggatgaaactgattggcagccgctggcgagagcgggtcggcaagccaggactgataaagaatgaacagcgcgtggtgcgcacgctttttggcctgtggatcgtcagcggagaaggcgcggatgcaggtattctcagtgagatgccaggctctgtcggccaccagcgggttggccgtcagcttcagcgacagcgcgttgctgtgcagaagctggtcaattaactcatccagcgccagcctggtcatcaccgcggtctggtcgcttccaatcaccccattatctgtgttacgcatgatttatccctgtgaaatacatggctactatacggtatagtaccgtccataatgcggcaacgtatatttcacacgcattttcaatttattgtttattaaaaagtttaaatgagtacaacaaaaaccactaaaatattattgatattataaaaacaataacattaccattcagtacagtgacaaacgacacaaggaatcatcatgccttatctgttactgacgctggcggctctgttctggggcgggaattatgttgtcgggcacgtgctggtgcagggcgtggatccgatcctgatgaccgaagcgcgctgggcgctgacggcgctgctgctgggcctgctctaccgacggcaaatcgccggcagtcgccgcctgctgcgggcaaacgcgccagcggtggtggtgctaaccctctgcggccaggtcagtttcccgctcacgctctatattggcctgcaaaccacctccgcgctcaacgccgccatctatatgtccgccacgccaagtatggtgctgttgattaaccgactgtttttccgcgatccggtatcagggcgtaactggcttggagtggcttttagcaccctcggcgtgatgatcctcttatttcagggaaatccgctgcacgccgcctctctgcacacctttgccatcggcgacctgtgggcgatggggtcggcgctgagctgggcgctctactgttcgctgttacgtctgaaggaccgccgaatcccggcgaatggctttgtcgccgtcagctcgctgctcggcgccctgatcctggtgccaatcgtcatcttctggctgatgcgccacccggcgcaggactgggcagcctggcgcgagccgtttttcctcagcggcctggcgtatctggtaattttcccatcgtggctggcatacctgttctggaacaaaggtatcgccaccattggcgccacgcggggcgaaatttacacccacatcatccccctctccggcggggtgttgagcatcctgttcctgcatacccagccgcatgcctggcatctgtttagcgcgctgttcatcatggtggggattgggatctgctcgctggagaaacgccaggcggcgtctattcgtctgcgtgactaatgtatgcgaccgggcgcctggccacgcccggtcacaaaagttaacggctggtggagagcggctggtgatgtcccgctcctgcggattggatcacccggccttcgcgaccaaaaaaggtcaggacggtaatgacaatcgccaccgtcccggccaccagggccattgccaggccgtagttatgcccatgatgctgggcgattgatgcctggagagtggcattcaccgaagccagcaaattacccagctggtagacgaagccgggcagcaccgcccgggtgttggccgggaccagttcattgagccaggtggggatcaccccccaggccccctggaccataaactgcatcaggaacgcccccgcccccagcgccagcgagccgctggcgaaagcccacagtggaatgaccggcagcgccagcatggcggcgatcataatcgctttgcgtcggccaatcttctccgacagcgaaccgaagaacactccaccaatgatcgaggcgatgttatagcagaccgcgatgatgctgaccgttttaggctcgaagccgtgctgaactttcaaaaagaccgggtaaagatcctgcgtcccgtgagagaagaagttgaaagccgccatcagcaccaccaggtacaggcacagcttccagtggctacgcagtaccggcagcagggccgtactctctttattctgcctggccgcctgccaaaccggagactcctcgacgcagaaatagataaacggcagcagaagcaccggcgcggcgccaatgacaaacatcccgcgccagccgagttgttcaaacagcagcccgtaggcgacggccgccagcaaatagccgaaggggtatcccgcctggaacaggccggacatcaggccgcgcgagcggtcggggatcgtctccatcgccagcgaagaggccacgccccagatcccgcccatcgccacgccgtacagcacccgcagcaggaaaaacagcatcaacgacggcgcggcggcggagagcagctcaaaagccgagaagaacacaatgttgagcatcaggattggtttgcgaccaaacttctccgccgccctgccgaaaattagcgcgccgacgggccgcacggccagagtcagcagaatcgccagagtgacctcctcaaggtcgacatgaaacgagtgggcgatatcgctcagtaaaaaaactaacaggaaaaagtcgaaagcatcgagcgtccagcttaaaaaactggctatcgccgcattacgctgtcgtgaggtccagccgtgcatcttgtcatccctatcccgacggcattgccgggagtgtgcgcggcgtccagcagagcgagctggggtcgccgcttgtgtaaattgtttgtatagaaagttgctcttttgttaattacaccccttttacgacaatcggcaagtttattagcatgctaatttgtttcaaattgcgtgttcccctcaccggttcggtaattttcgaccagaattaaaaccaggttcgcttaagcgaagcgtcatcaatgccgcatctgcccacaggaagggagagaatcatgaagagaattgccatcgtcggcgtggggccgacggggatttacaccttttatgaactggtgaagcgcggtgagccgctggccatcaccttgtttgaaaaagaggcgcaggccggggtgggtatgccatacagtgacgataataccgcggcgcaaatgctggccaatattgccagcattgagatcccccccatcgacctgacctacctgcaatggctgcagcagcaaagcgatgactggctgtcagcgcgcgggcttgaacggcacgccctgcatgagcgccagtttctgccgcgggtgatcctcggcgaatactatcgcgaccgttttctgtacctcgttgagcgggcccgggacgtcggctttgtgattagcgtttgtgaatcctgtgaagtcacggatattgcggttcagcccaccgggatcgccatccacaccgatagtgcagcagacccggtaattgtcgacctggtggcgattgccaccggccatctgtggcctgaagaagagcgcgccagccgacagtacttccccagcccgtggaccggcctgatggaggcccgcattgccccctgtcgggtggggatccttgggacttcattaagcgcgattgatgccgccgtggcggtagtggcccgccacggcgttttccataccgaggacgacaaaacgacccatttttccctccatccaggcagcgaagcgctggagatcaccctgatgtcacgccacggcgtgctgccggaggccgatttttactgcccgatcccgtgggagccgctggagattgccactcccgccgccctcgaagcggccattgcggagggtagcgacgctctgttaaatcggatttttgagctgatcgttaaagagctggaatatgctgcccccaactggagcgaggcgatcgggcttcgtcagctgacgcctgacagtatcgccgacgcctggtttgccgaccgcctcacccatgacccctttcagtgggcgcagcgcaatctgcaggaggtggagcgcaataagcgcgaacaccacacggtgccctggcgctatgccattctgcgcctgcatgaggcgattgaaaccgtggtgccgcagttcaacgacgcggacagccgtcgcttccgccagggcctcgcccgggtatttatcgataactacgccgccattccgccggagtccatacgtcggctgctggccctgcaccgggctggcattctgcggatcctgacgctgggcgaagattatgagctgcagcgggagcctgaccggacgctgattgttcatcatcgtcagcgctgcgaattcgatgtctttatcgatgcccgcggacaaaaagcgctgaaaacccgggatctgcccttcccttcactgcgccagcagctgctggcctgcggcgacgacattccggacgttggtgatgactacacgctgcaggcgccggagacagtgcgcggtcgggtcgccttcggcgcccttccctggctgatgcacgatcgcccctttgtgcaggggctgacggccagcgccgagattggcagcgcaatggcccgcgccgtgtcgcagcaggccgccggccgacggcgccgtctctggtatatcgaatagcggagcgcttaagcgcaatatccgaatactgggggggtgaacaggcgtgctataaacagcaactgtccgtcccctgcacgaccacgtttaacatttacgaggtattcatgagtcatctttttagcgcgacgcgaattggtcaactcacccttgataaccgtatcgttatcgccccgatgtgtcagtactccgccgacgagggtaaggcgacctcctggcaccggatccatcttggccaactggctttctccggcgccggcctgttaattctggaagccacagcggtagagcctgcggggcgtatctccccgggggatctggggctgtgggatgatgaaaccgaaaacgccctgcgcggcgtagtcgaagatattcgggcctggtcgccgatccgtctggggatccaactgggtcatgccggacgcaaagcatcctgcgccgccccctggcagggaggccatcagctggcgctcaacgatggtggctggcagaccgtcgccccttccgccgtggcgtttcacgatggcgatcgcgcccccgctgaactgagccatgccgatctggcgcgcatcaaagcggccttcgtcgccagcgcgctgcgcgcccagcggctgggctttgagctgattgaactgcacgccgcccacggctatctgctgcaccagtttctctcgccgctcagcaaccagcgccgcgacgagtacggcggttcgctggagaaccgaatgcgctatccgctggaagtctttaaggcgatccgcgaggcagtgggcaacaccatggcggtgggcgtcaggctgtcggctaccgactgggtcgaaggcggctgggactgcgagcagtccattaagtttagccagcagctggaaacgctgggcagtgactatattcacgtctccagcggcggtttgtcgccgcagcaggcgatcaccgttgggccgggataccagttgcctttcgcccgcgatattcgccagcaggtagccatcccggtgattggcgtggggctgatcaccgacccgcagcaggcggaagcggcgctggagaatggcgatgccgacctgatcgccctcgcccgcgcggtactctacgatccgcactggccgtggcacgctgcggccagccttggcgcccaggtccgtgtgccgtcgcagtatttgcgctcggagccgcacggcctgaaaggcaccctgctgccaaaccgttgaacccacggcgggcataaaaaaggggtatcgtaagatacccctgagcaggatgttattgcggtccatgtgccgggcggcggcgacgccttgcccggcctacaaaagggtgatacccggtcattgcgcagccaacgcgctcctgcgtaggcagcgcaagcgcagcgccgccgggcaatctatcaggctccgctccctatatttccgggcggcgggtcaggcaaacaccgcgagttactgctgtgcggcaggcggcgcggcgttctgtttatccttcgcgatactgtcctggatggctttggttttgctcgccgcttcagccgagagctgattggcgtcaccgatggcgttgtctttgatctgacccgcctctttgactatgcggtcactttcctgctttgcgttctgcttcaccgcatcggcctgggctttcgcctgctgggcgatggcgtccgccttcttgtccgcctcggccttgatggcgctggcctgatccttcaggcgatcggcctcggcgtcagcctggcttttcagcgtatcgatttgtttatccgcatcctgtttaattgcctgcgctttatccgccgcggcatccttcatctgctccgcattatctttagccttatccagtttgttatcaactttcgacgcatcgtcgcagccaaacagggtcaggcacagggcggaagcgagtagtgttttattccagagtttcatcagcattcccttacaggttaagtcgttatccagctttgtgattcgttgcattaatagcattcacattttatatataaacgctcagccgatagagtcaaggcgacagcgccgattgtcagtccagggtcgccaccagcccctgcagccagtcggcaaagacccgaaccttatgcgagagatgccggtgcggatagagcagcgacaacggtcgacgcggcgccggaaagtccggcaaaacttccaccagttgcccgctgtcgatataaggttgcaaaaagaaacgcatcccctgcagcatccccagccccgccagcccggcagcagtaaagacttcagagttgtccagcaccagtttaccgggaatggcgatctgcctgatgccctccggggtctggaatcgccagggcataatctgccggctgctgctgttcacccagttcaccgccagatgcgactgcaggtcctccagcgtcgcgggcgccccatagcgcgccagatagcccggactggcgcaggtggttaatgccacctcccccagtgaacgcgccacatagtcgccatcctcaagatcccccacccgcagcaggcaatccagaccatcgcgcagcatatcccggcgtacgtcggagctgctgaggacaatctccacctccggatgggcctgataaaaatccggcagatgcgggatcaccagcagccgggcaaaggcgatcggcatatcaacgcgcagctgaccgcggatcggccggtccggcgcgaacgactccagcagatcgtcggcctgggagagcaacggtttgctgcgacgataaaactcttccccctccggcgtaagatacagacgccgggtggtgcgctgcagcagccggaccccgctctcctgctccagctgctgcagtgctttggtcaccgccggtcggtggatctgcaaattttccgccgcctgggcaaagctgccggcatcgacgatttcaataaaaattttaatattttcaaacagattcatttgcatgatggcccgcctcccacctcttcatcagttcacattattactaatttaataatagtgatgaaagtttttgctcattttttaaaacaataaagacgcctacactgccctcattgccgcatcgctggggcgaacaaatttataacttattaacatacaaggaaaaatagcatgcaacctaaccgcgtcgcccgcattctgggtattgaaaaaccggtggtccaggggcccctctcctggctaaccgatgctcgtctggtggcggccgtcggcaacgccggtgggcttggcgtgctgggcccgaacgccggactgacggcggcaaccgccgtctccaccccggaggccaccgccgagaaaatgcgcgaagagatccgcaaaaccaaacagctgacggagaaaccctttggcgtcaacctgatcccgacggcggaaaatgacatctggacgccggcgatcctcccggtgatcaaagaggaaggggttaaggtggtggtctacaccggctacggcgacggttcgttaaaaccggcgctgttcgacgaactgaaagccgccgggatcaccattatctatcgtgacatcaacccgacgccggagaacagccgccgcgcggagcaggccggagcggatattattgtcgccaccggctttgacgaaggcggcacgctgccgggtaccgccctcgggaccttcaccatcgtcccgctgatcgttgacgcggtacagcgggttccggtgatggccgccggagggatcaccgacgcccggggcgcgcgcgccgttcatgccctgggggcggagggcgtcttcgccggttcggtatttatcagcaccatcgaaagccgggttcccgactcggtgaaagcgaaaattgtggccgccaacggtctggatctgcgcctgttccgtaccctgccggactactaccgcgcgctgcccggcaaactgagcgacacactggtagccatggaccgggccggcgcctcaaaagccgagctggcccaggcgatgggcggtctgcgcgggatgcggctgggcatgctggaggggaataccgatgagggatatatctcggtgggcgcggggatcggcaacatccatgccatcacctccgtcgccgaggtagtcaaccagctggcggtgtaaagccgccagccggggcacggtgaccggcgcgatcaggcgtcggccaccttctctaccgcccgggagaaagcgtcgatagccagcccgacgtcggcggcggtcaccgactccgccgggtgatggctgacgccccccaggcaacgcacaaacagcatcgccgatggccagcgctcggcgatggcgatagcatcatgccctgcgccgctcggcagcgtcagggaacgcccctgcaccgccgccaccgcctcgctcagcaccgcctgcaggtgactgtcgcaggcggtggcggcgatgcgataatactcctcggcggcgaaactcagctggcggcgcccggcaatggcctgcgcctgccccagtagctcatccagcagcgccgtcagcggcgcatcctgcgggccgcgaatatccagcgtcagctgcacctcgcccggtatcacgtttaccgcgcccggcgcacagcgcagggtgccgaccgtcgccaccaggttaccgccgcgctggcgggtcaggttttccacctgcaccatccattccgccgccgcggcgagagcgtccttgcgatgaagcatcggcaccgtgccggcatggccagcttcgccggtaaaacggcagttcagccgtctggcgccgttaatcgcctccaccacgccgagcgccagccccgcctgctccaggcacggcccctgctcgatatgcagttccagataggcggcgatatcccgcgggtgacgggccgcgtgggcgatccgcgccggatcgagtccggcattcaccagcgcctgggcgacgctcactccatcagcatcgcactgtgacagccagctttcaggccaggtgccggtgacgccgcgactgccgagcagggtgatgccaaagcgggtgccctcttcatcgccaaagccgacgatctcgattgccttcgccagccgtcgcccctgctggtgcagacgctggaccacctcaatcgccgccagcacgccgagcatgccgtcgtagcgtccggcgttgcgcacggtgtcaagatgagagcccagcagcaacgccggcgccccctcctgttgtccttcataacgtccgcagatgttgccgacgctgtcctgccacaccatcatgccggcagcctgcatccactgccccaccagctggttggcctgcagatgctcgggcgacagatagacccgggtcagggcatcggcggtttcgctgagggcggccagccgatcggcacgcgccatcacccggctggcggccgcctctctctccgcctgctggcggacggtgtcactcatagggtggcctcggtgcggtagtgatcccaggccgcctgcatcgccgcgccctgagtggtggtgaacctgaggtagttcaggaccgcttccagcgcgctgagcgtctgcatcacgcagtctttacgcgcgttataacccatggtgccaatgcgccagactttaccgtgcagcggaccaaacgaggtgccaatttcaatgccgaaatcttccagcatcagtttgcgtacctgatcgccgttgaccccgttggggatcaccacccccagcacgttattcattttgtgccgcaggtcgccaaaggtctcgagccccatcgcctggatgcccttcagcagcgcatcgccgtgcagtttgtggcgggcgatgccgttgtcgagtccctcctggaggatcaggcgcgcgcactcccgggcggcgaacagcgccgaggtcgcttcggtatggtggttaaggcgctccggcccccagtaatccatcaccatgccgagatcgaaatagttggagtagatcatctcgtcgacgccatcgtgatgggcatcggtgcggatcccctgctcaatgcagcggcggcggcggatgacctcttccatccgcgggctgagggtgatgggcgaggtgccggaaggaccgcccaggcacttctgcatcccggcggacaccgcgtccagctgccaggcgtcggtttccagcgggttaccgccgagcgacgcggtggcgtcggtatagaacagcacatcgtgacgacggcaaatctcccccagctccgccagcggctgcagcatggtggtggaggtatcgccctgcacggtgagcagcaggcgcggccgcacgcgcttgatcgcatcctcaacctgatccggcgtaaagacctcaccccacggcacctcgatggtgtgcacttctgcccggcagcgacgcgcgatctcgcacagcagatgaccaaaccggccgaacaccggcaccagcaccttgtcaccgggacggatcgccgacagcagaatcgcttcgatcccggcgcgcgaggtgccgtcgaccaacatcgtccagcgattttcggtgcgaaacacgccgcggtagagcgccatgacttcattcatgtagtgggtcatcgccggatcgtactggccaaccagctggctcgacatggcgcgcagcacgcgcgggtcggcattgatcggccccggccccatcagcaggcgctgcggcgggttaatttgcgaaaactgagtgatatccatctgccattccttacgttagttaagaccgcgcaccgaggagataaactgtttcagttcgctggtctgcgggctggcgaacagcgttttgctgtcgccctgctcccagacgcgtccctgatgcataaacaccacgcggtcgcccacttcgcgggcaaaattcatttcatgggtgacgaggatcagcgtcataccttccgccgccagttgctccagcaccttcagcacttcacccaccagttccgggtcgagcgccgaggtgatttcgtcacagagtaaaactttcggcgacatggccagcgcccgggcaatggccacgcgctgctgttggccgccggagaggttggccgggtagtaatccagacggtcgccgagcccgaccttctccagcatccgctgcgccagctcccggcattcggcctgggacttcttcagtacccgccgcggagccagcatgacgttctccagcgccgtcatgtgcgggaacaggttaaagttctggaacaccatgccgatggagcggctgatctcccgggcctgtgaatcgcggttggtgatggtcatgcccccgagcttgatgcttccctcctggtagccctccagaccattgatacagcgcagcagggtgcttttacccgagccgctgcggccgatgatcgagatcacttcccccatgtcgatatccagatcgacgcccttcagcacatggttgtcgccgtagtacttctgcatctgattaatggtgatgagaggcattgaatttgttctccagatagcggctgtagcgggacagcggatagcacagaatgaaatagcccagcgccacaagggcaaacactttaaacggctgataagtgacgttggtcagcatcgtccctgccttggtcagctccacaaagccgataatcgatgccagcgccgtgcctttgatcacctgtactgcgaacccgacggtcggcgcgatggcaatgcgcagagcctgcggcgccaccacccggtacagggtctggccgaagctcagcccgagacagcgcgaggcttcccactggcctttcggcagcgcgcgaatgctgccgaaccagatatccagcagaaaggcgctggtgtagagcgtcagggcgaccgaggcggcggtccacgccgagacgtcgacgccgaacagcgccacgccaaagaatgccagaaacagctgcatcagcagcggcgtgccctggaacagctcaatatacccgcggatcagccgtttcacctggcgtccgccggtgagacgcagcagcagtaacggtaaggtcaccagcgccccgccggtgaacgcgaccagcgacagcagcaccgtccagcgaccggccagcagcaggttgcggataatgtcccagtcagtaaaagtggtcatcaggcctgtacccccagccatttacgccccgccgccatcagcagctggcgcatcgctatcgataacgctaagtagatcccggtggtcaccagatagacctcaaagctcaaaaatgtccgcgactggatcaggttggcggcgaaggtcagctcctcataggagacctgcgacaccactgacgagccgagcatcacaatgatgcactggctgaccagcgccggataaatccgctgcagcgccgggggcagtacgacgcgaacgaaggtttgcgtccggctaagcccgagcacgcgaccggcttcccactggcccttcggcgtcacctggatgccggcgcggacgatctcggtgctataggcgccgaggttgaccaccatcgccagcagcgccgcttcaccggcggtcatcttcagtccaaggttcggtaaaccaaagacgataaaaaagagctgcaccacaaacggcgtgttgcggatgatttccacatatccgccccatacccggctgagcattcccgggcgcccgctgcggatcgccgccccgaggatgccgatcgccagtccgccgatcgtcgccagcaccgtcaactgcaccgtcacccacaggccggccagcagctccggccagtgcggccagagctcagagaaatgaagttgctccgtcatccccagaccttacgcgccgaggctggcaggcagtggcgctttcagccacttctcagacagaccgttgagggtgccgtccttaatgccctgctcgatgagggtatccacttttgccttcagcgccggttcgttctttttcagaccgataaagcacggcgagtccttcagcataaagctcgggaccggcgctttgtcggcgttctgccgggagatggccgccaccaccagattgccggtcgcgacatactgcacctgaccggacaggtaagccgacagcgtagtgttattatcctcgtagcgcttaatctgcgccgcctgcggcgccacgctggtcagcaccatatcttccactgccccgcgggtcacgccgatgcttttgccgctcagcgcggccgcgtccttcaattccgcccctttcgggccaaacacgccgaggaagaacggcgcgtaggcgcggctgaagtcgatcaccttctcgcgctcggcgttcttgccgaggctggagatcaccaggtccaccttatcggtctgcagatacggcacgcggttggcgctggtcaccgggaccagctgcagcttgagcttcatcgatttcgccagatagcgcgccatatcgatgtcatacccctgcggctgcaggtcggtgcccaccgagccgaacggcggaaagtcctggggtacggcaatgcggatgacgccgcgtttttcaatatcctggagctggtcagcctgcgcggcagaaacagacgataggagacaagcggccccggccagcgcgatcaacagtttcttcatgatgtttacccgttacgttagcatgaaacaaaagattctttgaatctgtttttgcaactaatgttccagatacagacgaggcgagggttggcgaggaattaaaacaaaaagtgagaaaggacaagcgttaacggaaaagtgttcagagagcggcggcgccatgacgtggtttttattgcaccataataatgcacagcaccacgctggcgccccatcagcgttgttccagctcgtccagctgctggtaaagcgtggcgatatcgtggatgcgcggacgaccgctgtcgagcgtttcatggagaaaggcattggccagcagattaatcaggctgttgaccgaggcatagctatcgtaggcggagacgctgtccagcggcgcgcagagctgccagcgggagagcggaaacaggctatgggcctgcggctcgcacattaacaggaccggcaccccgtcgcgttgcagctgctgcagcagcgggcgtactattcgcggccggcggcgaaacgccatcattaccaccagatcatcggcggtcagatcgaccagctcttcgctgagactctgacccggctggggcagcaccagcacctggccgcgggcctgcagcagctgctgacgcaggtgcagcgccgccggataggcgttgcgcatgccaatcaccacaatgcggcgggcggccaccatcgccgtcagcgcctcagcgaactggcgggcgtcgagggcgttgacccactgggtgaggtttgccatctcctgcttataatggcgcgccagcagcgtgttaccctgcaccgcgtcgcgctggtcggtgagcggcatcccgctctgacgcagagtgcgcagttcatcgcgcatatccttatatttgtcgtaaccgaggcgcttaaacagccggctgacggtggctttcgacacgccgctcagctgcgccagctcggcgctgttgtagcttatcaggtcgtcaaagtggtcaaagatgaaatccgccacccgctgctcctgcggcgacagcgaggcgtattgccctttcagtcgttcatcgagttgttgcatagcgcccctgtaactttcgtttcatcatctattcctcatcatactgtatctgctatgccttacacatagcgtgccagtgggaaaattctggtcatcgtttttatcaatgaaacgaaacgttcagagatggaacagcttttgcagtgttctgcgggtgattcgttcagaaaggataatttatgcacagtagcaacgtttcgacccacggcatggcggtggccccccaccacctcgccagtcagagcgcgctggcgatcctgcgcgagggcggcagcgccattgaagcgatggtggctgccgcggcggccatcgccgtcgtctatccccatatgaatggcctcggcggcgatggcttctggctgatcgtgccgcctgagggagacccaatcgccattgacgccagcggggccgccggatcgctggcgaccctcgaggcctacgccggacagcggcatattcccaaccggggaccgcaggccgcgctgaccgtcgccggcaccgtcagcggctgggtcgaggcgctgcgtatttcacgggacttaaccggccgcgcgctgccggtggcccgcctgctggccgatgcgatcggctatgccgaagacggcattccggtcactgcctcgcaggcccacgccaccgccagcaaactggaagagctgcgccatcagccgggcttcagcgaaacctggctggtagcgggcgaggccccgcggcccggcagccgcttccgccagcccgccctcgccggtaccctgcgcatgctggccagcgacggtctcgacagcttttatcgcgggccgctggccgagcgtctcgcgcagggtatggccgcgctggggatgccgatcaccctcggcgacctgcaggcccaccgcgcccggcgtccggggccgctgacgctccagcaccagcagggcacgctgtggaatcttgccccacccacgcaggggctggtgtcgctggcgatccttggcatcaccgaccgtctgaagatggccgatgccgacgacgcgcaaacggtgcaccgtatcgtcgaagccaccaagcgggcatttgccctgcgcgatgcgcatatcaccgatccgcgccatctggatgtggatgtacagcagttgctcaccccggaagccctgcagccgctggccgacagcatcgacgacgccagcgcttccccctggggcggcggcaaaggcccgggcgataccgtctggatgggcgtcgtggataacagcggactggcagtgtcgtttattcagagtatctatcacgagttcggcagcggcgtggtactcccggacaccgggatcgtctggcaaaaccgcggggcggccttcagcctcgatccgcagcatctcctggcgctggcccctggcaaacagccattccataccctcaaccctgccgccgcccgcctgaacgatggccgggtgatggtctatggctcgatgggcggcgacggtcagccgcaaacgcaggcggcgctgtttactcgctatatcctgcagggggtaccgttgcaggagagcatctcccgtccgcgctggcttctgggccgcacctggggccagtcctccgactcactgaagctggagggacgctttgcccccgcctgtatcgcgcgcctgcgcgagctggggcacgacgtagaagtgctggccgatttcagcgaagcgatgggccacgccggggccattgtccgccatcccaacggtctgcttgaaggggcgaccgatccacgcagcaacggcgccgccgccgggtactaaggagcagaccatgaccacacagccagactggagcgagtatctgacgcagatgactcacctgttggatatggagctggatgcgccgcgccgtaaggagctggagcgccagtttgcccgcatcgccgccatggcgcagccgctgatggactatcccctcgggccgcgcgaggagattgcgggggtgtataaagcatgactcttcaacacttcaccattgccgatctccagcgtgcgctgcacgatggcgaactgagcgcccgggagatcgcccgccagacgctggacgatatcgcccgcgtgaatccgcagatcaacgcctggaccgaggtcaccgcccagcgcatgctggcggaggccgacagcatcgacgccctgcgccgggaaaagcgccccctgccgccgctggcaggcattccttacgcagtgaaaaatctgtttgatgtcgccgggcataccaccctcgccggcgccgaactgctgagcgaccggccgccagcgaccagcgacagctgggcggtgcgccagctgcacagcgccggcgccctgctcagcgggatgctcaatatggacgcctacgcctacggcttcaccaccgaaaacagccactatggcgcgacgcgcaacccgcacgatctgtcgcggatcgccggcggttcttccggcggttcggccgcggcggtggcggccgggctggttcatttcagcctcggcagcgacaccaacggctcgatccgcgtccccgcgtcgctgtgcgggatctttggcctgaaacccactttcgggcgcctgtcgcgctctggcagccatccgtttgtcgccagtctggatcatattggtccttttgcccgccgggtagccgacctcgccgcggtgtatgacgccctgcaggggcgcgacccggccgatgactttcaggctgataaagccagcgagcgcaccggcaatctgctggaacgcggactggaggggctgcgctgcgcgcggctgggcggctatttcaccacctggtgcgatgacgacgcccgggcggccgtggatcgggtcgcccacgcgctgggcgccgacagcgagctgcagttcgcggatgccgcgctggcccgctcggcggcctttatcatcagcgccagcgaaggcggcaatcagtacctgacggatcttcgccactcgcccgagcgctttgaacctcactcccgcgagcggctgctggccggcgcgatgatcccctccgcgtggtatctgcaggctcagcgttttcgccgtcatgcccgtcaggcaatgaaatccctgttcagccaggccgacgtgctgatcgccccggccaccccatgcagcgccacgccaataggcgcggaggagatggtgattaacggccagccgctgccggtgcgcgccagcatgggaatgctgacgcagccgatctccttcctcgggctgccggtggtgaccgtgcccctgcgtaccgccagcggcaagccgattggcctgcagctgattgccgcgccgtttaacgaacaagcctgtcttcgcgccgcgcgggcgctggaagcgatgggcattaccgatgcccgagtggcggagagtgcagcatgatcaatctggataatgtagaccgcccggcgatcctcgccgaggtaacggcggcgttttatcagtatgaagaggcgctggtgagcaataacatcgaggcgctggatgcgctgttctggcacgacccgcgcaccgtacggctgggagccggcgaaaatctgtatggcatcgaggcgatccgcgcctttcgcgccgcccgccccgccgccggtctggcccgcgatctgcgccataccaccattaccacctttggcgcggatatggcggtgtgcagcaccgagttcacccgcgaaggcagcgcgcgcctgggccgccagcagcaaacgtgggtgcgctttccctacggctggcggattgtcgccgcccaggtcagtctgatggactgagtggcgtatacgggagcggaccggagaataaggtatccaccggcccgcttccggtccggtaacatgttatttggagtcgaagatcatggtgttcatcagagcggctgaagcagaagatatcccctcgctgcaaacgctatttctgcagctgggctatcagacggagacggcgatcttagcgcaacgcatcactgccccgcagagcatgatgagtgcgctggtggcggaaacagaaaacgccgtgtgtggcgtaatcgttatcaattttattttaccggtacatgagaaccgtttatgggcattaatttccgcgctggtcatagaggaatcgtcacgtggatcagggataggccagcagcttctccaggccgcagagcgcctcgcccgtgataaacaatgcgctcagatcgagctttcaagtagtgaaaaaagaatcagagcgcatcaattttatgaaaataacggctacaaggaggttcgcaaacgcttcgttaaacatttgtcttaaccgcctgcgcgcgagggctttccccggatgaccgtaactatattttgcccagcaggatatttaacatgcggcgcaggggttccgccgccccccacaatagctgatcgccaaccgttaacaccgagtagactgggtcattatttagcgacattttcttgtagcggccaatacctacctgcagcgaaccactaatagcagccggggtcaatttactgacactctcttgcttattattgcggacatagtttacccacggatgggaatgggtgactaactcagcaaattctgcttcgctgacctcacgtttaagtttcagcgtaatcgccgcgctgtgacagcggatcaccccgacccgaatgcataaaccattgaccgggatggtacccggcgcaaggccaagaattttattagtttccgcctcgcccttccattcttcgcggctatttccatcgcctaaatcgctgtcgatccagggaatgatgctgcccatcagcggtacgccaaaattctccaccggcatgcccgcgctgttaatcagctcactcactttatttaccaatggcagcacggaacctgatgccgtcagttcatccgcagataaatgctgactgatatacgcgctttgcgcgattaattcccgcacctgtttggcgcccgctccggaggcagactggtaggtcatcacgctcatccattcaatcaggtcagccttgatcagcccggccaaccccatcaggctcagcgtaatggagcagttgccgccgacaaacagtttaattcccgcttttaccgcactatcgatattttcgcggttgaccgggtcgagaataatgcaggctttttcatccatccgcagcgccgaagccgcatcaatccagtaaccttgccagccatggttaattaacgctggatagatggctttggtataatccccgccctgacaggtgatgatgatatccatttcggcgagtgcgctaagggaattcgcatctttcagcctgtcgcttttaccattaataaccgggcccggggcacccgcactggaggtgctaaaaaaatgcgctgtaatatcgtcgaaatcattttcttcgatcatgcgttgcaacaatactgagcccaccatccctcgccaaccaacaatacctacctgcttcatttatttaacctttataagttatgagaatgttaatttgagtgtcgccataccttatatcgtatcccccaataaaggtcattacccagcacatcgatttttatcattattaaaatgtttcatctgccatcagcgatatttatctcttattacggtcaagcagatataaggcggcggcgactgtccagttttcggcattcaaaggtgaaacggcgtagcgaaacggcagcagcttcttctccgggtaccatgaagagtaacttgcattttgatagtgactatgtcaatttgctggcaaaagccacctgctacctggacctcccatgaaaaatgaaccgctttgccgcgctccctgccccatcgcccgcagcctgggccgcatcggcgacagctggagcatcatgatcctgcgcgacgcctttgcgggctttacccgcttcgacgaatttcagaaaagcagcaacgtcgcgcccaatattctgtcgcgccgcctgaaggaactggtcgatgacggactgctggagaaggtgtgctacagcagcaccccgccgcgctacgaataccacctcacgccgcgcggccgcgatttccgcatggtgctgctggcgctggcggaatggggtaaccgccacttcgcccccgaagggcgtcagatgcagctggtggaaatggcaacccagcgccacgtggagccagtcatggtggataaagcgactggggaagagattatcccgggtaaatacgccatggtgccgggccccgccgcctcgccgctgatgaaatatcgtcatgaatatctgctgcgcaaacgcgaaggcgatagcgggcaaaaattccagcctgaaccttacagagatgccagcaatgaatccggccagtaagaaaaatattcttgtcctggcggccctgggcgctgccgccctggcggcagcgagctacggcgcttactggtggcataccgggcgctttatgcagaccaccgatgatgcctatgtcggcggcgacattagcgccatctccagcaaagtctccggctatatccagcagctggcggtgcaggacaatatggcggtgaaaaaaggtgacctgttgatccgcattgacgaccgcgattatcgcgccgccctcgcgaaagccgccggagaagtggcggcgcagcaggccgcgctggccgatatccaggctacccgccagcttcagcaggcgaccattaccggctctgcggcctcgttactggccgccacggcggcaaccgaaaaactggctaacgacaaccgacgctataacgccctggccgcgtcgagcgcgatttccgcacagatccgcgataacgcctccgccgattatcgccgggcgcacgccgagcaggagaaggccaaagcggataaaaccgtggccgaacgtcagctggcggtgctggatgctcgccagcagcaaatcctggctgccctggcgcaggcccaggctaacctcgagattgccaggctgaacctcagctataccgacattcgcgcaccgttcgatggggtgattggcaaccgccgcgcgtggtccggctccttcgtcagcagcggtacgcagctgctctccctggtacccgcgcacggcctgtggattgacgctaacttcaaggaaaaccagctggcgcatatgcgtgccggccagccggtgaccatcgtcgccgatgtgctgccgaaccatacctttaaggggcatgtcgccagcctggcgccggcgaccggctcacgcttcagcattctgccggcggagaacgcgaccgggaatttcactaaaatcgtgcagcgggtgccggtccgcattgcgctggaaggtgacggggcaaagcttgacgtcctgcgcccgggactgtcggtgatcgtcaccgtgaacgaaaagagccctcgatgagcaccgttcaggcgctgtccgccccgcagggtctgtcgatgccgacggcgaagaagatcttcgccttcgccagcatgtgcgtggggatgtttattgcccttatcgacatccagatcgtctccgcctcgctgcgggatattggcggcggcctgtcggcgggcgacgatgaaaccgtctgggtacaaaccagctacctgatcgccgagatcattattatcccgctttccggctggctggcccgggtcatgtcgacccgctggctgtttgccgcttccgcggcgggcttcacgctgatgagcctgctgtgcggctgggcgtggaacatccagagtatgatcgccttccgcgccctgcagggactggcgggcgggtcgatgatccccctggtgttcaccaccgctttcgccttttttcagggcaaacagcgggtcatcgccgcggcgacgatcggcggcctggcctccctcgcccctacgctgggtccaacggtgggcggctggatcaccgaaaactacaactggcactggctgttctttatcaacgttgttccggggatttacatcgcggtggcagtgccgctgctggtaaaagtagacagcgccgaccccactctgctgcgcggcgccgactatctcagtattctgctgctggccttgtccctcggctgcctggaatataccctcgaagaaggtccgcgctggggctggtttgatgacgcgaccctgacgaccaccgcctgggtcgccctgctctgcggcgtggcctttgttatccgcaccctgcgccatccgcagccggtgatggatctccgcgccctgcaggatcgaaccttcagcctcggctgctatttctcgtttatggccggcgtcggcatcttcgccaccatctatttaaccccgctgtatctggggagcgtgcgcggtttcagtgcgctggagatcggcctggcggtattttccaccggtctgttccaggtcatgtctattccgttttattcgtggctcgccaaccgcgtcgacctgcgctggctgctgatggccgggctgatcggctttgcggtgtcgatgtacagctttgttccgatcacccacgactggggggcggatcagctgctgctcccgcaggcctttcgcggactggcgcagcagtttgccgtcgcgccaacggtgaccctgacgctgggcagcctgccgcccgcgcgcctgaagctggcctccgggctgtttaatctgatgcgcaacctcgggggcgccatcggcatcgccctgtgcggcacggtgcttaacgacagaaccaatttgcactacagccgcctggcggaccatctgaataacgccaacctggcaatgagcgattttgttcagcgcagcgcggcaaacttcaccgtccaggggatctcgccggatgccgcgcagacggcggcgctgaaaaatctttccgcgctggcgctgcgggaggcgcgaacccaggcattttccgatgctttctacctcatcatgatgggttttttgcttgccgcgctgctggttcccttgatgaaaaagccgccggcacactgatactacaggagagttaactatgggcgtttccgttaaacgcattgtcgtcaccgggatggggattgtcagcccgctgggctgcggcgtacagcacgtctggcagtcgctgctggcaggtaaatcaggggtcacccggctcagcgagcagctggtcgcggatattccctgcaaagtggccggccaggtgccgtccattgacagcgatccgctgcacggcttcgacccgctggcgaccatcccggcgaaagagcgcaaaaaaatggatcgctttatcgagtttgcgctggtcgccgcccgcgaagcgctgacccaggccggttgggcgccggcatcaatggccgaacaggaacgtaccgccacggtgatcgccaccgggatcggtggcttcagcgagatcgccaatgcggtacataccaccgatgaacgtgggccgcgtcgtctctcgccgttcactatcccctcttttctggccaacctggctgccgggcatgtgtctatcgcccacggcttccggggccccatcggcgcgccggtcaccgcctgcgcagcgggtgcccaggccatcggcgatgcagcgcggatgatccgcagcggcgaggcggatattgccctctgcggcggcgcggaagcggcaattcatcgcgttagcctggccgggtttgccgcggcaagggcgctgtccagcgcctacagcgaccagccggaaagcgcttcccgcccctttgaccgtgaccgcgatggttttgtgatgggagaaggcgccgggcttattgtgatcgaatctctggagcacgcgctggcgcgcggggccacgccgctggccgagctggtgggctacggcaccagcgcagatgcttatcacctgaccgcaggcccggaagacgggaacggcgcacgtcgggccatggagatcgctattcgccaggccggggtgaccgtcgaagagattgatcatatcaatgcccacgctacctcgacgcaggtcggtgataaaggcgagctggcggcgattaaaacgctgtttggcgcgcatccggtcgccattacctcgacgaaatccgccaccggccatctgttaggcgcggccggcgggatcgaggccatcttcaccattcaggccctgcgtgaccaggtggtgccgccgacgctgaacctgcatcaccccgatgaagacgcggcaggcatgaacctggtggcgctgcaggcccgcccgcagaagatgcgttatgcgctgtcgaacggttttggctttggcggcgttaacgccagcctgctgctgaaacgctgggaataatcgtcaactcccccgcggtactggccgacgggggatttccaccgttgcggcttttgccctgctgctggagtaaatcaagtacaacgcaatacccagggagacaatggcgccgattcggctcatcgagaatggaatcgacgcattgtccagccagccgaagttatcgatcaaggtcagttttgagcgaagaacggaccacactatctaaataatgatatcgcctattatgttgggaccgctcatgttaaaaaagggatagcttttcttttcattgacgataacgaaggaattttcatggttgaggttgaggaaataaaaaagaaatatcccggcgcagatgcctggcaaatgggtgacagtccggaactggctaacgagcttgctgacctgatcaaaaaagggatcaaaacggcctcttgcggatcttatgcctcttaccagcaggaagaatttgccccgagagtcgggagttataacattattcttgatggccagaatgttccagtttgcgtgatcagactgatttcgatgcagctggttcgtttttgtgatgtcactgaagcgttcgcccgcaaagaaggtgaaggcgatttaagccttgaatactggaagaaagagcatcagagatttttcagctctgaaggtcatttttctgaagatatggagttgatcgcagaagaatttgaagtggttgaggtgctgtaaggcaaggtcaacgggctgacgttttatcactggccactcataacactgttcgcttctggcgcggagcggacaagctgtcgagctaaaggtccgcattgagcaaggagctgacgtgccagctataattggtaataaaatgagagtagaactattctgatttgtttaaaaaaacatttttacatccaagggcaaaatattttttatgctatcttacatgctatctcaatatgccaggctacctgtgcctgaagttactctacgttcatggttaaaacaatggttgtcagagcaggaatcgaggtgtacagacagaagtttctcggcgcgatttccctggagagaaactggattatgtcaggaatattttttacaacgaaaactcaaaattgatggaaagcaatttcttactggcccccgttatcagggcggaaatattaacaaaccttttattgatattgtaggtatggattctgacctaaatcatactgcattagggaaggtgcgaacaagttcctgatatgagatcatcatattcatccggagcgcatcccagagggacatcatgagccatcaactcaccttcgccgatagtgaattcagcactaagcgccgtcagacccgaaaagagattttcctctcccgcatggagcagattctgccatggcaaaacatggtggaagtcatcgagccgttttatcccaaggcgggcaatggccgacggccctatccgctggagaccatgctgcgtattcactgcatgcagcattggtacaacctgagcgacggtgccatggaagatgccctgtacgaaatcgcctccatgcgcctgtttgcccgattatccctggatagcgccctgccggatcgcaccaccatcatgaatttccgccacctgctcgagcagcatcaactggcccgtcaattgttcaagaccatcaatcgctggctggccgaagcaggcgtcatgatgacccaaggcactttggtggatgccaccatcattgaggcacccagctctaccaagaacaaagagcagcaacgcgatccggagatgcatcagaccaagaaaggcaatcagtggcactttggcatgaaggcccacattggtgtcgatgccaagagtggcctgacccacagcctagtcaccaccgcggccaacgagcatgacctcaatcagctgggtaatctgcttcatggagaggagcaatttgtctcagccgatgccggctaccaaggagcgccacagcgcgaggagctggccgaggtggatgtggactggctgatcgccgagcgtcccggcaaggtaaaaaccttgaagcagcatccgcgcaagaacaaaacggccatcaacatcgaatacatgaaagccagcatccgtgccagggtggagcacccgtttcgcatcatcaagcggcagttcggcttcgtgaaagccagatacaaagggctgctgaaaaacgataaccaactggcgatgttattcaccctggccaacctgtttcgggtggaccaaatgatacgtcagtgggagagatctcagtaaaaaccggaaataacgccagaaatggtggaaaaaatagcctaaataggctgattcgatgtgtttgcgggaaaaaaatcggcccagatccgcgaaattttaatcagcgagtcagcttgggaagaaatgacctgcttattcgcaccttccttaactcattccgattcggaactatctatgtatatgggcacaattattccgcagaatatcccctcgatgaaaactgcagaaagagcgggacgaacttgcatcctaagttatcaatttctacccatctgcagaacccacgactaacagcaatgctaatttatcttcagcctacttccgcttttggcacacaggggatgtccagggcccgggagtactcccctggacgcattaatgggcaggatgtgattgttgcgcaggctatcatatggcctgaggtacagcagaatcaggcttcgtagcaatgagtcggctcacagcgtccggaatccaccacccggtgccgtaaatcaccgcaaggtctgtcataaggtaatttcatcacacatcgcgacaccttttttctttacgcaggccttctctttcacggtttgtcagaactgtggaccgcagtaatctccactccgtgctttaatcaatgagagtgtgtcgggtgcaaattaaactacctttctcaacagcaaaggcgggatatccctgccctcgcagggtttctgcgtctggtaatatgcccatgacagtctcaaagaccgctttgagggtttcccggtttaaggcacataatcgcgtggcgttgcccccaaaatgcagcgaaaagcagcggtaaaggccgccgggcatgagaaaccaagctggcaagcgacctgtttgattggaacaccgttcgcgagaagatccaacgaagcgcaaattctggctctctgcttccatgttctaaaactaaagcctgtatccttcataaacaagcgggaaaaggtccgttccgacatggccgacataaaagccagctcgctcagcgatgcttcccagcgctgattgaccagtagcgatctggccgcgctaaataatcgctcatcattcggcatgggtagcgccatcgttaaaggtggagcctcgctgagaatttccagaagcaacaacgctatcttccgttgactcggtctggcgtagtcctcactgaacagccctgcgataagctctttgactaagggcgtagccgtgatcacatgcacctgttgactcttcgtaaagctcgtacattctgcgataaggctactgctgaaatagatcgccctgagatcggtttgtgaaagcagatggtaactatggatatgcaaaggcggtagccataatgcccgctgaggagggatcacccaacggtcactctctgtttgcaccagcataacccctctggtggcgaagagtagctgcccctcaacatgatgatggggaggatctacctcgccgcgttgatagcttatcgcagtacttgaccagcctgtggcttcatcatgtcttggcgctttatctatactacctggcatttcagatttagcccctgccattatcatatcgaaactggaaccacccggagtagagccttaggcaatgggtgcgtgacttatcattctgatcatcaaagatattacaggagcttaacctcatgcgtgtacactttatcgtacatgaaagttttgaagccccgggcgcatatgaaacctgggcaataaaccagggtcatgatgtaacttactcacgcgtctatgcaggcgatcggctacctgctgacaccgtaggcatcgattttcttatcgttatgagcggtccgcaagatccggacaccacgcttgaagagtgcccgcactttaatgctaaagcggaacaggcgctgattgcttccgcggttaaaaccggtaaggcggtgatcggtatctgcctgggttcacagctcattggtgaagcgctgggcgcgccgttctctcatagcccggaaaaagagattggtaaattcccgatcacattgaccgaagacggcagtaaggatgagatgttctctcactttgggaaaacactggcagtgggtcactggcataacgatatgccaggtttgacgccggaggctaaaattatcgcttacagcgaaggctgtccccggcagatcgttgcctattcagaccgcgtctttggtttccagtgccacatggagctcacattggacgttgtagaacggctgatcgctcattctgagaaagacctgagccgtgcagcagaatatcgtttcgttgacacgcctgaagcgctccgggcgcacgattacagtgaaatgaatcaagtactttttggctttttggataagctggaagcacgttacacagcagcgcaagcataatgttatgctcggtaagcttgccatcggttttgattttaatgtccgctcctggcacagagcgaacaagctatctgagttgaaggtctgatatgagcgatcagcggacgttggctacactgttaaacgtcgcagactcagcttctgactgccagtttttcgcgagttgggccttcaaagtagatgctcctgatatggcaattacggggttgagtcagcacaaagcgaattgcttcccagactgaacgcccattcatcagacgttcccccattttgggctggctatcgacaaacgcctctaaccctgtcagctcgaaatccgggggatacaacccagtcacacgtatattttctttagacaactggtacgaaagtttagttgtaaacccgctaagcccgtgtttactggcaaaaaaagcggggtgcgcaattgaatctgtaaaattaggaatcccacatgaagatataattgagacgatatccgcactttctgaacgtcttaacccgggtagcaatgcctgagtcagcagaatagaacctgtcaggcctgaactgatagtatttatgatttctgtgtctgattgatcgtctaacgttcctgaaagccactgagcagcattgaggattaaaatgtctatgggcttgtctaaagttaacaactgtgaagaaaactgagaaagggattcaggtagggttaaatcacagagatgccctttcgccattccgccttcagccgtaatgatactgcaagttttttgaatgtcatcagcgcgcctcgcgcaaaagtccacctcgacgccttctcgcgctaaccatacgctcagcgcctgaccaaatcccgtgccaccaccggtaattacagctcttttacctctcagcatcttcatccatcctttattaatgaataggggggaatgtagatatatatgaggaagcagattgacatctttcagttagtgccattttttgacgatagggataagttgtactgctacatttccatcgcgctcctgtgggcatgcaacatccgctcctggcactagtctgccgtaaagggcagctttaagggaggagcggacgagctaacgcaggtgaagatccgctgtgagcgaaaagcggatttttgtcgttctgtcatcaaaactggcgacttatattaggatatcgcaatacccctcgccctcaggctacgtctgcttgaattgattgcctcaagaaggcggaggcggctttccgctgattgccgctacgcgcacagcaggcgtaccggtcatttatgtcagcgtcggattccgcaaggggtatccagaggtcagcaaaaacaacactatcttagcttcgattaaggagaatggagtttttatggctgataacgagagcacggctattcatcctgatgttgctccagcagaaaatgaagtcgtcatcgtcaaacgcagagtcggagctttctcgtttactgaacttgagatgatccttcgtgctcaaggcatcgaagacctgattcttacgggtgtaactaccagtcgtgtggtgctttccacagtcggacaagcttttgatctggattaccgccttatcgttgtgaatgattattgcgcagatccagatcctgacaccaatatgtttttacttaaaaaagttctacctcaacatgcttttgttaccagttcctctgaaatatcaaaacctgggcataaaactatgaatttctgacgtcaaaaaacgggaggatataaccggggatccccagtcatctgaacgtccgctcctggtggcgatagtcagcatcatgtctggcccaggagaaatctccagaagcgtcagtgcgagaaggaaagtcataaacgtttcgatggaaggcatcctggtagagtccgaaaacatatttccgctacgttacctccgttcgatgcgggaaagaagcggacgttgtacttcaatcatcatcgatttgaatgacagcaaggtaacggctaatccaggtgacgtaaatgtgtcgcgatcccccagcttagaacggtacagcttccattaatcagctcgaaaacggcgtaactcgcattgggttgtgcatagcggtgaaaatcatccacagatccactttttaatgtcgcaagcacgccctgaatgacctgcccgtgagacacaatacatattgttcgatgatgatgttttttttccagactggataaaaaatgtatcattcgctgcgaagcatctgagagagactcaccccctggcggacaatactctgcatccaaggtgaataatgcttctgcggcgtccggattattttgcagcagcgctacggttgtcatgccttcaaactgaccaaaagcctgttctttcagagccggttcagctatcagtgaacaataaaaacgctcagccaggcgctgtcccatttgccaggcccggccaagtggagacgcgtaaacacattctacccggtaatcactctctgcaaacgctgccaataaagctgatgtttgacgctccccacgaagcgtcaatgcgctatcactgtgtccctgaataatattttttacattccattctgtttccgcgtgtcgaaccagtatcacttgcatcattgcagggtcacataagccgttatttgaaatgttatcatctaaaaaccctcctttgatatgcaggcaagttctcagctctcgacgaaaaacaggaacaagtgtagctgataatggttatgttcagcttcagaagtgacgtagttatcgacgttaacgtctgctctggcacagagcgaacgcttccccttgtcgacgcgaaaagcaactctgcccatgcctctatctcagtaatacctgtatcagttgaacgacgatatacactcccgctaccacctgtatgatccgaaacccccatctcagatagcgccattgatggcgttcgctggcatcagccgcttcaatcgcgggatcataacgttttcttttcctggttctgaaggtatcgaatccccacaggatgagaagaaagatgatgatgattttttcaacgataagatggttcacaaagagagactccggtattctcacggttacaggcagaatagataaaccgcctggatgtagccaccactaaatgtaggggtacctgaagacgaagccaggccttcctggattatctgtcttatgaccgcgtaaacgcatagcaacgccataaaagcgacattcatttccgacacatgctgccggagtccccttccccgacgcatcaggctgggtgataaaacgacggcggctgcccggtcacgcggcggaacatggtggcgaaagaggacgcattgtcgtatccaagggataatgccacttcgttcaccggtttgcctgctatcaaccatgccagggcgctcaccacgcaggctcgctgtcgccaggcggaaaacgacaggcccagctgcttcaggaaatggcggcgaaaagtactaggactcataaacagcgccctggcccagcgcgccgcaggatcatggatagaggggttaagcaaaaaagcctgacaaagcgccagcagcgccggatgctgcggcaacggaatgtcaaattcgcggaccggcatggcggccagttccagcaacatcaactgtatcagcgcgcgatcgcgtgggctgtcgtacaacggtggtaaatccacagcctcaagcagtagctggcgcaacagcggcgagacgctgatcacttcgcaacgacggtgtttaatgaaagcggccacacaatctggctcaatatacaagctacgcgtggtcacccctgcaaatctgacggcatgcacggtttcaggggggatccagacagcgtgttgcggaggaaccacccattctccgtcctgcgtagtgacatacattagtccggtcgcgccatacagcagctgtgcgcgacgatgctggtgcgggggcaggataaacccttgcgcatagtcattacctaacgccaccacatcacgatcgagtcgatcgacctcgtcaatttttacgttgcgcacacctgcctccctctgaccgatttacaaaggtaattgagcgctacgcaaatgggaagcagtacgcgaccggtataagctgctcgctcattttcaggtcggggatactctcttgaatgagatcgttattattgcgctggcaggctttactaccggcattaccacggtgctgttcggcttcggcggcggctttgtggtggtgccctttgtctatcaactgatgctccggcagccggcgatcgcgggcaacgccatgcatgtcgcagtggctacctcaacggcggtgatgatatttaacgccggctgggtcagctatcgaaactggcgggcgggcaggcttgccgcgcagacgctgtttccgttgttatggtttattgccattggggcggtggtaggctcctgtctggcggggatattgagcgagaatatcgttcgcgcgctgtttattctctatatgctggcaaccatcagcgattgtttgttgcgcaagggttttttcacgggcagcgctcggcgtcgcctgtccctgcccgtggtcaccggcggcggtgtgattatcggtacgatcgccgcattgctgggcgtgggtggcagcgtcatgacggtgcccctgctacgacgacacgggtatgcaatgcaggagtgcgttagcgcatccaacccgctttctttgcccgtggcgctatgcggggctgtgacctatgccgtcattggctggcacagcattccgctgagcggatttctggggtttatcagcctgaaaattttaagcctgctcgtcctgaccggctgggccgggatagtgtttagccgccgggcaatccctgcggtacctgatgtatggtatgcgcgcatctatgtgctgctgctgtgcctggtactcctcgccatgcttattcaataatcaaattacattctggtgaaccggtgtaacagacgcggccgggcggagccctctccctggagagagggccaggttcaggggcaacaagctacccgcgatacggatgggtttcgcgccagtggtcggcaatctgctgccgggtgcagacccacaccttgtcgtgctgctggatatagtcaaggaaacgctgcagcgcgcggaaacggcccgggcgccccagcagccggcagtgcattcccacggacatcatcttcggcgcggtttcaccctcggcgtacagcacgtcaaagctgtctttcagataggtataaaactgctccgcggtgttgaatccctgggcggtggcgaagcgcatgtcgttggcgtcgagggtataaggcacgatcaggtgcggccgctggctgccgtcgctgcaggtcacttcgctccagaaaggtaaatcatcgccgtaataatcgctgtcgtagtcaaagccgccgtgctccaccaccagctggcgggtgttagggctgtcgcggccggtataccagccggtgggcggtttgccgaacaggtcggtcagcacctgcaccgctttttgcagatgcgcgcgctcctcggcgatatccatgtgctgatagtggatccagcgccagccgtggctgaccacatcgtaatccgcggccttgatcgccgccacaatctccgggtgccgcgccagcgccatcgccacgccgaaaacggtcaacggcagcccgcgctggctgaactcgcgatggatgcgccagaaccctgcccggctgccgtactcatagagtgaatccatcgacatatggcgcgccgggtagctggcggcgccgataatatcggacaggaactgttccgaacccgcatcgccatgcaggacgtgattctccgcgccttcctcatagttgaggacgaactgcaccgcgatccgcgccccgcccggccagcgcgcgtgcggcggctcccctgcgtaacctcgcagatcgcgaggatagtgttcctggttctctcccatctcctgccccttttaaaatggatttaacgactgaaactgtccgcttaacgcttttttctccgggaacgctaagtccccatgcttgctggtcgccaggcccagcgcgaccagcgactccaccatcttcaccgccgcgctgacgccatcgatcaccggcacccgcagctcgcgggtcagctcctgcgccagggtcgccatcccgccgcagccaagaacaatcgccccgctaccatcctctttcagcgcgcgaatgcagcgctcacgcactttctcctgcgccaggccgctgccgtcttccagagccagcaccggcaagtcaatggcgtgcagcgccgcgcagtgttgatgaaatccgtactggtgcagtaaatgacgggcgatgatcaacgtacgcggcagcgtggtcacaatggagaaacgggtggcgaccatcgtcgccatatgcattgccgcctccgcgataccgatcaccggcccctgggccagctcccgcgccgccagcagccccgggtcgccgaagcaggcgatcacatgcccatccaccccctgctcgcgtccggccctgatctgctccagcacgccgaccgccgcgatggcttcgtcaaagtggccctcaattgacggcaccccggcgcggggacagaccgcaaggatctcggtgcccggcgcagcgaccgcacgcgcggcggcgcctatcgtttcggtcatcgccaggctggtgttggggttaatcacttgtatacgaacggaagacatcacgactccttgtggccggcgaacagccgggaaaaatcgggcaggctgacgccatcgcgctcgaagcacaggctggcgacaatatgatcaaaatggtgcatcagcgcctcgctgagcggctgcagggctttatcccgcagcaaaccgaccagctgctggtgatcgtcgcaacggcagccctgtcgccagggggcgccccaggcggcaatcactaaagaggagcgctggctgaggcgggtcaccatctcggtgagcaccgggttgccggagatagcctgcagctgaatatgaaagtcagcggagtggtggatcgccgccgggccgtcgtgcgtcgcatgggcctgctgttcacgctgaataatgttctccagcgccgccagatgcggcggctgacagcgcgcgatcacatcggggagattggcgacctcgagcagcgcccgggtgcgaaagatcgcctgggactcttccacgctcgggctggtgacgtgtgcaccacgtttgggcgtcaacgtgaccagttgcacagcggcgagtcgttgcagcacctttctgatgccggtgcggctcacggcgaacacctccgccagcgcctcttccggcagtttgctgcccggcggcagctgatgttcgacgatagccgtcatcagcgcctggtaaatgctttcgtccttgtcctgcagcgctggcgcggcctggagacgatgttcattattcattaacccactccggtttcacttatcgatagcagatcgtatacataaaatttaatttttgtatacaagattcatcattctggcctggatcctgcaatagcctcagcaatccatatcaaagggttttcattcagaggagcaggtttcatgccacattcatcccacacgcagcagacgaagactcacaaggcggccgccggctacagtccgcggctatgtaatgacgatctggcgccgacccgcgaccagaactggagctggtacaatatcttttcattctggatgtcggacgtgcacagcatgggcggctacgtagtggcggcgagcttctttacgcttgggctggccagctggcaggttctgctctgcctgctggtgggcatctgtattgtccagctgtgcgccaacctggtggcgaagccgagccagatggccggggtgccttacgcggtgatttgtcgtcaggcgtttggcgttttcggcgccaatatcccggcggtgatccgcgggctgatcgcctttgcctggtacggcattcagacctatctggcggcgaatgccctgatgctggtcctgctcaagttctggccctcccttgcctcgctaaccagcagcagctttctcgggctgtcgcccctcggctggctgtgcttcgccactatgtggctgctgcaggcgatggtgttctggcatggcatgaacgccatcaaacgctttatcgatatcgctggtccggcggtttatgtggtgatgctggcgctggccggctggattgtatacaagactggtctggacggtatctcctttaccctcgccagcaaatccctgagcgccggcgagcagacctggcagatgatcaccgccacggcgctggtggtctcctacttctccgggccgctgcttaacttcggtgacttttcccgctacggcaaaagcatgggcgagatccgccgcggtaaccgctggggactgccgtttaactttctgctattctcggtggttaccgtggtgattgtctccggcacccagtcgctgtttggcaaaatgatcaccgacccgatcgaaaccgtcagccgcgtgggtaacgatctggcggtggccatcggcctgctgaccatgatcaccgccaccatcggcattaatatcgtggctaacttcgtctcgccggccttcgatttttccaactgcgccccgcagaaaatcagcttccgtaccggcgggatgattgccgcggtgggctcgatactcctgacgccgtggaacctgtttaactcgccggagctgatccactataccctcgacgtgctgggcgcctttattggcccgctgtttggcatcctgatcgccgacttctacctgatcaaacgcggccgggtgtcagtggacgatctgtttgacgatacgccgcagggtaaatattggtaccgcaacggctttaacccgaaagcgattgccgccctgctgccgtcggtgggcctggggctgattatcagctttattccggccctgcatgaagtggcgaacttcagctggtttatcggcgtcttcctcggcgccaccacctaccgctggctggctcgcgacgagcgcgaagtgcaggcgaaagctgccttccgctccggcgcggtggcgcaaaaagagtaaccctccccacctgccgcggcgtctggccgcggcaggctgcaaactggcaccaatcttgctgtttatcactattcccagagcgttaagagaaggcaggttcgatgatggattaccagaccgcggtgcgcggtgcattttttgatatcgccggcgtggcggagaccccggatgaggtggccgcccaggcccgctatctcgatgatggcttgttgttcctgcaggaggggaaaattatcgccctgctgccatggcaggagggggaagcctttctgcatcccctgaagggctatgtcgatctgaggggtaagctgctgctgccggggttcgttgatgcccacgttcactatccgcagaccgagatgatcggcgcctttggcgaacagctgctggagtggctcaccacctacaccttcccggtggagagccagtttgccgatgcggagtatgcccaggagatagcgcagttttttgtaaatcaattgataagccatggcaccaccaccgcgctggtgttttgtaccctgcatccggcttcggtggaggcgttattcagcgaagcgctgcgtctgaatatgcgcctgatcgccgggaaagtgatgatggatcgccatgtgcccgactacctgtgcgaaaccgccggggagagctacgagcagacccgggcgttgatccgccgctggcatcagcgcggcaggctgggctatgccatcaccccgcgctttgcccccacctcgaccccggggttgctggaggcggtgcagcgcctgcgggccgagtttcccgacacctggctgcagacgcatctcagtgaaaaccgggaggagatcgcttgggttaaacagctgtggcctgagcatgcgcgctatctggatgtctatcatcactatcagctcaccggcgaacgcagcgtcttcgctcacgggatccatctcgatgatgccgagtggcagtgcctgcatgacaccgggtccgcagtcgccttctgcccgacgtcgaatctgtttctcggcagcgggctgttccgcctgcccgcctgctggcagcaccaggtgcggatgggcatcggcagcgacgtcggagccgggaccaccttcagcatgctgcggacgctgggcgaggcctacaaggtaggacaactgcagagctatcgcctgcgcgccagcgaggccttctatcacgccaccctcggcggggcgcgcgccctgcggctggaggagaaaattggcaatttccagccgggcaaagaggcggattttgtggtgattgacccggcggtcaccccgctgcagcgcctgcgcataggccgctgccatgacatttatgagcagctgttcgtgctgatgaccctgggtgatgaacgcaatatcagcgagacgtgggtgaatggcgagcgggtgtggtgtcaggattgacccgtttgagaagcggaaacaaccttcggtaagacaataaatcagcaccaagccctaaatgatcttaaaagatccttcagggggattaggctggttaccagttaccgtaagggtagtgcttccctttgataaaatctataatatctttgtcatatccataagaaaaatcgctccttgttatatctttacaaatatctaatttattacctgatacggttttcaggactgacggagtgacgcggtaattagattcagatccacttccctgtaaccagacggccacttttccttctggagccagaccaatttgcattctgttgtaccaggcaatacgtccccgataatccttatatttactcggcataagcatctgttccagtaccgatttagggatcgtcaaatgggtttcatacacttttttatcaataatcgagtcccagcaaaaaataatatgtcgtggagggcgctttacgtgattccagtaccctaccggcgcacggtctttgtcgttccactcgccgatcacgccaggcagatcgggtgtgctattcagcgtgttaaagcgatagtcatttccatcaacgtcaagaatagcggcaaacgtcaccacggcgggtaacgctttgggtgtgaaaaagttaaaactccactctgttggcgcatcactatgcatggcggtgttgggcaaaggttttccctgacaggcagccagcgccaataatggaagcagacaggccgcacgtattatttccatattttatttccgtccatatcgtaaacggtacgctgccagcggtcatcaggccggttggtgaatgtcaccagcttcgccggtttgaccgcaccgctgataataccccgactgtctcgtataacgctgttccagttggccgagcagtggatatatttttcggccaacatccgcaattccggtgtggtaaagcctggggcagacttaccactccttatcgctcggcccatcgcaatcgctttttcacacaaaccgttcagttcttgcctaagctttaagtgtgcatttgtatctcgaataggttcaaacaccgccccggcatcctgggccgcatcgagcatcacccgcaataccacttttgaccagtcgttgaaagtcggacggttgataaccagagctgctccactgcgtttctgtagcgtgccgtaacggtcagctggcattctgtcgtcatgccaggtatcgacgctcacctctaccgcatttagcagtagagctattgccggatagccgtccatggttttaagttttgcacaggtctgccggtaaatacgcgtttccgtatccgggatggaaaaggggacggtttcaaactctggtcgggtaaggaaataagcttcattctcgttgggattatagccgccaccaatgtcggagtgcgcaccgggtagcgccagctccggccacgctggctttacgctgttcaatgcaaagttaaaacgacattcatgctgcgcggtgatgtgaaaaaccttctccgctacacctggacgtagcgccagattgacatctcctgtgtctgcgctgtgcgggttaaagccgttaaccggggtgccgatcgccgccacggtatcaaatatgcccagaaagcgggttttaccacccggtgcaccggagaattcaataccattcaaaccggctctaatcgccgtgataatgtcacggtcctgactgaatacccgattggcaaagtgccgtgccgcaccagccccgcgactgaaaccgaatatatcaaattgtatctctttgatggtgcaggaaccatcgcttgcatgctgaagtaaatattcctgaataccgacagtcagagctgcaactgccttatcggtttttctcaccacaccggtatcgcctcgaccagtacccattccgtaagtattgtcgccagctccgtcttccgtgccaataccttcaacataaatggcgtgctggcctgctccgctatcgggtcggatatcctgcctgtacaatatatacaaccagtgcacattgctataatagccaatatagctccctgcggcagtaccactatagccatgctttagtcgcacgcactgaaagtacgccgttaccgcatcggcgtcattcatcccgaaatgttcgccggaacaggcggcctgacggtcaccgctattattcgcattgtttccggttccatcaaaaaacacaccgatggttagtgtgatttcccgttttttctttgcggcctgcgcacgctgttcaggctcaggctgttggttttttttcttcgccgtttccgcccgttcagctacccgcccggcattgcagtccctatcgtaggagtgagaaaagacggtcgggacgaaccgagcacgacacgggcaagagctgtagctgtccagtgagccagcccattctttcagggatccaccgacatcgtaggtgtcacccattcccccacagacgcgaaatcgcccctcgtgcttaccgcaggtcaccggatcgcccaccctgacctgttgccgctcaatgccgccaatgtggtaagtgtcatcaggcgcacccgaaagtatgcgtcccccacaggtggttttatccaggtgatacagaaagaatcccttcgccataatccctcacgaatgtaatggttataaaatcaacgcatcataccctgaagcatggctaagtcgaaattacctgtttctgattattgttaccgcgcctgaattggcccatttgcaggactatcaaaaactcattgccaggcctacaccatagcctgtggtgttattgccgaacatatagcgcgccaccagccgggtgcgggtgataaagaccgggtatttactgctgtccagctcgaggccaacccccaaggaggtcaaaccggtaaagcccagcgcccctcgctgctcgccgagaaattcagtatgcgccccctccagcacataacgcagtgggttgcccagcagcgtccagtcggctatcggcgcgcggcggcgcagatacaggccgagattctccgcgctggcctcgccctgcaccacctcggcgctactgccgaaactttgcagatgcatataggagtaacgcagttcggcatcaatatcctgggtggcagagaagcgttcgtaatccagcatcagtgccccgcccagcccccaggcgttgaaccgaccgccgtcgagaaattgcagatcggcgttggtttttcgctcaattgcccagctaccaatacgcgcatcgctggccagggtaccgagcatcacattgacgatcggccgcagcaccaggttgcctccgaggctgtcccggtgcagcgaaaaatcccaaccgacgccgccggtggtggtcagactgttccatttggtcggcacattccgcgtctgttcgccattgctgaccacaaagcacgggtcgtaacggctgtaacccatcgtaccttcaaggtacagaggaaacgactcgctgagggttgccccgccgccaaactgggtgatggccagattatgtttgtcgttgctgccggaaccaatgttgagatcgctggcggtcacgtcagggacgacggtatagctcatcagagtcaatacggcatcggcacgctgtttgatggcgtggccgttcgccgccagcgtcgctggcgcggaaagcgaaagtaccgacaggagaacgaaaagacgcaccatatgtcgtttgccacctcagcgacaggctaacaatattgccacctaaatcagcaggctggcgttcactcagtatagtcggtgagtcaacctgcgcgtccggcggggagaaaaagcatcgggctggtcaggccgcgcctccgcggctatgcagcagttccacattttcaaacggcatgcgcgagacccgattacgcccatcattttttgccgcatacagcgctttatcgacgcgggaaaacagttgatcaaccgtttcgccgtcatgatgttcagccacgccgatgctgacggtcaccgacagcgtctggtattcgctaaccgcctggcggatcccctccgccagtatcagcgcgcggccgatcggcgaatggggcaaaaaaagcagaaactcttctccaccccagcgataaattttatcttcgcggtcgaccgacgtttccagaatacgagagagcaccagcaggacctcatcgcctttttgatggccgtgaatatcattaatgctcttgaaatgatcgatatcgattaacagcagacaataaccccgggggataaaagttggcgcctcaaccagacggtgaaactcccggcgattaagcaagccggttaacggatcgtgggcggcggaaaattccagctcttttttcagatgcacttcttcggtgatatcgtgaatgatgcatagcatcagtcgaatattatacagcaccaccggcccggcataagtttggacatggcgtagcgagccgtcagccagaatatgcgtaaaattaagcggtttatgaccgccaggcagattggcaatattattcataatggggatgacgtcccggcccagggtatttatttgccaggtatgtttagtgcgcatttcctcatcggaataatgataaaaacgtagcgcggcaatattggcatcgacaatccggccatctttatgagggtcgatcaacagcatcggcgcggtattggtcataaaaaagcgagcgaaaaagccattgttacgccgctggtagcggcgggagccggtatgaatcgactgattttgcgccagcagcttcacggcttcaaacagcagcaagcaaccacagtcttcggtatcaatcagggtggttttgcaatacaccgactgcaacccattggcggtgggtaacgtccagacttcgaatatctcgctcatggtgtcgagatagcgaaggtagtgctgcagttgcgtttccggacaggtggaataaataccgttacgcatctcattgagcgacatctcgccgctcaatgtccgggaagcctgattggcatagaccaccctttcgttaaaaggatgaactacccatatcggggtgcttaagacctcaaaaacagccagctcttttaataacatacaggccccaaaccgacccactgccggcgcggaacggcacttatcgctgtgcagccccaacgctggtttaaagtgaaagcaaaatagacaccgagaaaccgcaattacgcgcgagcgcgccaagtatagtcggttatgcgcccagtaaagccctctgagggtgactttgcgcgcagtttaaccaacagaagcgatgctgcctttaataataattttatttcaacagcatagcagcaatgccagaacgggtagtcgcttttgatcacagagtgtgcatcgccaacaggggttacccggcaggcgcagcggcataggccagggcgggcagagagtcgcttttctgcccaggctaaccgtgatagtttctatcattacgctcattcatagcgacaattaccttgaaaaaaatcgccactaaaatcacccttgccgacattgcgcgtgaagcgcgcgtcggcgtagccaccgtcgaccgggtgctcaataagcgcgcggcggtgaaagagtccacggcgcggcgcgtgctggaggccgcccgccggctgggttttaccctcgagcagccccactatcgcctggctgccggcaaagcgccggtcacgatcagaatgggctttatcctgctgcaggagagccactccttctacctgccgttggcccgggcgctgacgcgcgaggctgccccatggctaccggcgggccaggcgccggtgatactgcattttgccatcgatgcggtggaagcgatggctcaggccattcaccgactcagcgatgaagtggaggtgctcggcctggtggcgctggatcacccgctgattcgccacgcggtggcccgggccgccgcccgcggcgtgcgcgtgttcaccctgctttccgatctgtcggtcccccagcgcagcgggtatatcggcctcgataatcataaagccgggcgcaccgccgcctggtttatcgagcgcttatgccgggggaatggcgaaattggcattatcattggcgataatcgttttacctgccaggaaagctgtgagatcagctttcgctcctgcctgcgagaacagggcaaggggcaacaaatccttgagccggttcgcagtcatgaacgggcggatatcgccaggaccgtgacggaacagatgctgactcagtacccggccctgcaggcgatctacgccccctgcggcggcgtcgaagggatcgtcgacgcgctgcgcgacagcggccgtcagcaggagatcgctctggtctgccacggtccgctcagcgacagtgaactggccctgatcgatggcaccatcgacatcatgcttaaccaccggctggatgagtttgccgccgttacgctgcgcgccatggcggacgccgcttcacgcccccatagcgaggtgatttcattccctcagcctttcgatatcatcaccaaagaaaatatgtaaatttccggctccgtctccagcggagacgggtatcgggcggaccgcgccacctctcgatttgataaaaaattatcaaaaaatccatcaattaaaatcatgatgattatcataaaatcaaaattccatcattgttgataatgaaatttttattcaatactcagcggcatcccttgtatgaaaaaggaagccgacatgatacatcctatcgctaacgccccctgcagctggggcgtcgatgacccgaaaaaccctaacctccctgcctgggctaccgtgctgaaggaggcggcgcaggctggctatcgcagcattgagctcggcccctggggttatctccccagcgatccggccagcctgcgcgcggcgctggagcagcatcagctgtcgctggtcgccggcacgatctttgacgatctggtgagcgaggcccatttccccaccctggtggcgctgacccatcaaatctgccgcaatctgtcgcaggtagccgctgccgaaccgatcccgggccgccctttccagccgccctatctggtgattatcgacttcggcaaccccgaacgggcgcgctttgccgggcgcggcgcgctggctccgcgcctcaatgacaaagactggcagcgcatgatggagcatattatcgcccttagcaccctcgcctggcaggagtacggtgtgcgggcggttatccatccgcacgccgggggcagcattgaattcgcggatgagatcgagcggctggccaacgatatcccgcacgacgtcgccgggttgtgtctggacaccggacatctctattacgccgggatggatccgctcgactggctggatcgctattaccaccgcctggactatctgcacttcaaggatgtcgacccgcaggtttatcagcgcgctatccatgaaggtatcgacttcttcactgcctgcgccgaaggggtgatgtgcccgctcggcagcggcgccattgactatccggctatcaaagactttcttgcccgccgggggtatcagggctggataaccattgaacaagagcgcgacccgcgccatgccgcaggcagcctgcaggcggtcacggaaagtctgcgctatctgcgcgacgtcggattctgacaggaggcacgacatgattaacggtttaaaacctctcgaccgcaccctgcgctggggcatggtcggcggcggcggcagcagccagatcggctatattcaccgctctgcagcgctgcgcgataacaccttcacgctgctggccggcgcctttgatattgatgccgagcgcggacgccagttcggccaacagctgggggtggatcccgaccgctgttacgccgactatcaaagcctgttccgcggcgaggctgcccggcctgacggcattcaggcggtgtcagttgccacgccaaataacacccactatgccatctgccgggccgcgctggaggccgggctgcacgtggtgtgcgaaaagccgctgtgcttcagcagcgaggaagctgacgagctggtggcgctcagccagcggcggcgcaagattatcggggtgacctacggctatgccggccaccagctgatcctgcaggcccggcagatgatcgccgacgggctgctgggcgatatccgtatcgttaatatgcagtttgcccacggttttcacgcccagccggtggaacaggaaaatgccagtacccgctggcgggtcgatccccgcttcgtcggccccagctatgtgctgggcgacctggccacccatccgctgtttctggtcgaaaccatggccccgcagctgaagatcacccggctgatgtgcgccagacaaagcttcgtcaaaagccgcgcgccgctggaagataacgcccatgtactgatggagtatgacaacggggccatcggctcactgtggagctccgccgtcaactgcggttcgatgcacgggcaaaaggtgcgaatcatcggtgaaaaagccagtctcgaatggtgggatgaacagcccaaccagctacgctacgaaatccagggcgaacccgtgcgcatcctcgagcgcggtatggactatctcgatccgctggcgcgtcaggatgatcgcatcggcggcggccatcccgagggcctgtttgaggcatggtcgaatctctatcgccgcttcgccatcgccatggatgccgccgaccgtcgcgacgaggcgctgctggccgacttctggtacccggacgcccgcgccggggcgttcggcgtccgctgggtggaaaactgcgtgcgttctgccgacaacggtgcctgctgggtcgacttccgctaactcgccggctcagggcgttcgtcctgagcctttacggctatttttctgtccgcgccagctgggttttatccgcctcatgggcgcggtccgccagcccctggaacgctccggcgccatagtattgcgcgggaaccggcaatgcctgcatatcgtgccctggatagatctgcagttcgccgaggtcgcgtaagcggaatcccccgacctgctccggcatggtcaggcgatacggcggcatggtttcgaatgggaccggcgtcggcagccggttttcctgtagatcgtagttacgcttcagtaccagaaacttatccggcacccgccggtgactgttccaccagtcgccgtcgatctgctgaaacatcgcttccgtctctccgcgcgtcgccaccagcagccgggtcagcacttgtttcagcgccgcatccatggcctggttataatcctccagcgaaccgccgtggccgctgaggatgacattaatcgccagcctcgcgcccagtaaattggagtagagatcctcgggcgaaaaagcggaaatctcttcggaaaacccggggaccgactggaagccataccactgggcgatctcatgccactgggcgatttcgaaggccagatgcccggcgagccaggccgccagctgatagcgctgcctgacgcccgccggcggcgtaaaggcattcagctgcacgcggcgcacgcccagttcttcactgtagaagatccgccccgcctgacccagcgtcggcgcaatacgattgaacagataaaaggtgttgtccgccgtatcgcgcacatgggcgatatcaataaacccgccgcggcgggtatagataagcccgttctgctcctcgctgagccccagcagatttttcaccgcaccgaacgcgctgtcgttgtaatggtgcttacccagcgtacccagagtcaacacattaccgatctggtacatcgggatcggaatgcccgccgcgcgcacgtgcaggtcgtaaccaaaagcgcagcacggtcgcagcgactccggcggcggcagctcaccgagggtgggcgccgtatggatcgccgtcacggcgggtagcaccggatcctgcgccagcgccggcagcgccagcgccagcgccagcgccagcgcgaataatagccagaaggctttacgcatcaacagcctctccacagcaataaaagtgcgcgcatcttaccggcagatagcgcctgcggttttagttaaaaacggtattcagcgccgacaacgaaactattgcgcgcgtaaaagccgctcttccgttcgtcgcggcccggtggttagtagttcttgcgcggaaaagcgctggctatcccccattaccatcatcctgcgtcaaggtggcgcggtgattgtattcaaaaggtgaatgtcgtataacatagcgctaccgaggggtgtcccgtgagggctgagatggcgcaagccgaaccctttgaacctgatctgggtcatgccagcgaagggacgggtcggcaattttgccagcattaccgccattgcctgttcacacccctgcacgcccggatctcccctgaataaatggaggtcctgtgatcgttcccgcttttagccaaggtctttacggccgtttacgccagctggccgccgctgactggcagcgctatgtggcgcatcctttcgtccagcaacttgccgatgggacgctggcggaaaacgcctttcgtcgctatctgacccaggattatctgtttctgattcactttgcccgcagctacgcgctgctggtgagtaaactgcgcgcgctgccggagatgcgggccgcggccgcctcaatgaatgccatcctcaacgaactgccgctgcacgtcggctactgtgcccagtgggggattagcgaaccggagatggccgcccaacctgaagcccccgaaaccctcaactatacacgctacgtgctggatattggccactcgggtgacgcgctggatctgctggtcgccctgatgccctgcgtcgcgggctacgccgaaatcggtctcggcctgctgcagcatcccgccacccgactggacgataacccctacgcctcatggatccgcaactatggcgatgaaggctatctgcagggcgtcagcgccgcgctggcgctgttggaaacggtgtggcagcagcgcgggagcgaggcgcgaatcactgagctgagcgagattttcaccaccgccacccgccttgaggcgcagttctggcagatgggcctcaacgccgcggcggagacccgggcgtgacggcgccgggtatcgaggtccgtggcctgagcctgcatgtcggcgaccgtcggctgttcgacaacctgtcgtttacggtccccggcgggcagtgggtgtcgctgctcggcgccagcggcgccggcaaaaccagcctgctgcgggtgatggccggtctggcgcccgccacccgcggagaagtggtcgccagcgatgggcaaccgattcagggccgtctggcgtggatggggcagaaagatctgctctacccctggctgagcgttagggacaacgtcgccctcggcgcgcggctgcgcggtgaaaaagtcgatcgtgcccgggtcgccgccctgcttgaacaggttgagctttcatcctgcgccgacgcccgcccggcgactctctccggcggcatgcgtcagcgcgccgcgctggcgcgcacgctgtatgaggatcgccccatcgtgctgatggatgagcctttctcggcgctggataccctcacccgtacgcgcattcagaccctggcggccaccctgctggccggtcgcacggtggtgcttatcacccacgatccgcaggaggcctgccggttgagccaccgcctgctggtcctctcggcggccgacggcgacattgatgatagccatcacctcgccggcacacctccgcgcgcgccggacgcgcccgatctcctgatcggccaggccgccctgctgcagcagctgatgagggcccaaccatgactggacgtctctggcgcggcggtatggtgttcggcgggctgatgcttctctggggtctggccagccgcagcggcattccccattttcttttaccgtccccgctggcggtcgccgaggcgctttgggttaatcgcgcctatctcggctggcatacgcttatcacgctcagtgagatcctgagcggcctggcgctgggcgtgacgctcggcgtcaccctggcgctgggcatgatcctctccccccgtctgcagcgctggctgatgccgctggtgctcaccagtcaggcgatcccggtctttgccctcgccccgctgctggtgctgtggctgggctttggcatgagcgccaaagtggcgatggcggtgctggtgattttctttccggtgacttccgccttctttgatggcttgcggcgggtcaaccaggagtatctcgatctggcgcgcagcatgaatgcctccttcggcgctcaactgcgacatgtccgcctgatggccgccctgccggcgctgggctctggcctgcgcatggcggcggcggtggcgcccattggcgcgatcatcggcgaatgggtcggctccgccgaggggctgggctacgtcatgctcaacgccaatgcgcgactgcaaaccgatatctgcttcgccgcgctgtttattttagtactactgaccctcctgctgtggctggcggtagataccctgctacaccggctgatcgactggtcgccggaataagaatgacgtaataaaggaaaacagatgaaaaagtcgctattcgccggggcaaccttgacggccctgttcagcggccacgcgctggccaatgaaccgctgacgctggtgctggactggtacattaatcccgaccatgcgccgattatggtggccgagcagatcggcgcctttaaggcccaggggctggacgtcaggattgtccccccttccgatcccgcgctgcctccgcgcatggtggccgcccgtcaagcggatctggccatcacctaccagccgcaggtgcacttctttgctgacgaagggttaccgctggtgcgtgtagggactctgattaattcgccgctgaatacggttatcgccctggataagcagatcaaaaccccggcagatctgcaaggcaagaaggtgggctactcggtcagcggaattgagcaggccaccctggcgaccatggcgcaacatgcggggatcgatccggccagcatcaaactggtgaacgtcaatttccagctgaccagcgccctgctggccggccaggtggacgcggttatcggcggctatcgtaatatagaagcgcaggagctgaagctgcagggcaaaacgccggtggtgatgaacgtcgaagattacggcgtgccggcctatgacgagctggtgattgtcgcccatcgcgacgcaattcatgaggcgaagatccgtaaattcctcaccgccctgcaggcgggagtgggctatctgcgcgcccatccacagaagagctgggaggcgttcgccgccgcccacccggagcttaggaccgaactcaaccaccaggcgtggttgcaaaccgtgcccctgttcgccaccgatccggcagcgctggataaagcgcgctacgagacttacgaacagtttttatataacaataagttggtgaaaaaagttacacctttaacaaattatgcggtggaactgcattgagtcttgctatcgctgacggaaggcattccgtcagcgctttaacgtagcggcaataaaaatatagagactttctcactaataattacactttaaagggttatagtgacagagcgttgttctattataattcagcaagttacgttaattttgcccctggtaagaataacgtcaaaatagcgcaatcaataaaacgttgaatgcggatttaaaaagccatatattgtgcgcgctttatgaatgccaattcaatttcttacaccaattattcaaccagcgttcaaccgcaatgctggttgtgggagtgatatgatgacggataaagtccgtattgatactttacgtgccgatttattagacgcaaacaacgaaacctttttggcccgtcaggccgaattcgaatcgaatgtcaggagttacccgcgtaagctgccgctggctatcactaaagccgaaggcgtgtggctgacggatgcggataacaaacagtacctggactgcctcgcgggcgccggtactctcgctctgggccacaaccaccctgatgtattgcagagcatccaaagtgtcattaccagcggcttgccgttacatactctcgatcttaccaccccgttaaaagatcgcttctccgaatacctgctctcttgcctgccgggcgaagggaaagaatattgcctgcagttcaccggcccgtccggcgctgacgccgtggaagccgcgctgaagctggcgaaaaaatacaccggtcgtaccgcggtgatcagcttctccggcggctatcacgggatgacccacggcgcgctgtccgtcaccggcaacctgtcgccgaaagcggcggttaacggcatgatgccggaagtccagttcatgccttacccgcacctgtatcgttgcccgctgggcatcggcggcgaagccggcgtgaaagccctgacctactacttcgaaaacctgatcaacgacgtggagagcggcgtccgtaaaccggcggcggtgatccttgaagccgttcagggcgaaggcggtgtcaacccggcgccggtcgagtggctgcagcgcatccgcaaagtgaccgaagagcacggcattctgctgatcgtcgatgaagtgcaggccggctttgcccgtaccggtaaattcttcgccttcgagcacgccggtattcagccggacatcatcgtgatgtcgaaagcggttggcggcgggctgccgctggcggtgctgggcattaaaaagcagttcgacgcctgggaaccgggtcaccacaccggcaccttccgcggtaaccagctggcgatggccaccggcctgaccaccctgcgtcatctgcgcgacaacaagatcgccgacaaagtcgccgcccagggcgagtggctgaaaggtaaactggccgagctgcagaaacgctacccggtgattggccacgttcgcggtctcggtctgatgatcggtatcgaaatcgtcaagccgaacgaagcgcaggatcacatgggctgctacccggctgacggcgaactctctgccctgctgcagaagaaatgcttcgaagcgggcctgatcctcgagcgtggcggtcgtcacggctgcgtgctgcgcctgctgccgtccctgctgatcagcgacgcggagctggacgtgttcctcgacaaatttgaacaggccctgctggccgccggcgtaaaaccggtctgagtggagtaagtgaccgccatgtccacattgaatccgattcttgctggttcagcgcagagcgttgaagcctatcagcaggttatcgagcagaccagccaggccgttgtgcagtggctgaagcaacctgagatgtatcaggggaaaagcgttgacgagctgcgtgagcgtatctccctagaatttaacgaacagggtttgggtaaccaggcggcgattgatcgtgcgatcgagtacttcctgaaagacagcctgtcggtgcatcacccgcagtgcgtggcgcacctgcactgcccgagcctggtgattagccaggcggcggaagtgctgattaacgccaccaaccagagcatggactcctgggatcagagcccgtcggcaaccattatcgagatgaagctgatcgaatggctgcgcgcccgggtcggttttccggcgggcgacgccggcgtcttcaccagcggcggcacccagagcaacctgatgggcctgatgctggcgcgcgacgccttcttcgcccgtcagggccactccatccagcaggatgggctgccgggggatatccgcaagtacaaagtcttgtgctcggaaaacgcccacttctcggtgcagaagaacatggcgctgatgggcctcggctaccgctcggtaacgctggtgaaaaccgacgaattcgcgcggatggacgtgtccgacctgcaggcgaagattgcgcaagcgcaggctaacggcgagcagatcatggcgatcgtcgccaccgccggcaccaccgacgcgggcgctatcgacccgctgcgcgacatcgccggtatcgctgcggaacatcagatctggctgcacgttgacgcagcctggggcggcgccctgctgctgtctgagcagtatcgcgactaccttgacggtctggagctggtggattccgttaccctggacttccataagcagttcttccagaccatcagctgcggcgcattcctgctgaaggacgcgcgccattacgagctgatgcgttatcaggcggcctatctgaactccgagttcgatgaagaacacggcgtaccgaacctggtgtctaagtcgctgcagaccacccgtcgcttcgatgcgctgaagctgtggatgggtctggaagcgctgggccagaaacagtatgcggcgatcatcgatcacggcgtcacgatggcgaaaaacgtggcggagtacgtgaagtcgcagccgacgctggagctggtgatgcagccgcagctggcgagcgtgctgttccgttcccgtccggcgcagatggccgggagcgacgcggcggctatcgcgctgctcaaccagcgcgtcggcgacgccctgctggcctccggccgcgctaacgtcggcgtaaccgagcacaacggcgttacctgcctgaagctgaccctgctgaacccggtggtgacgctggatgacgtgaaggttctgctgaacctggtggagcgcaccgctcaggagctgctggcgcaataacctgccttagcgaggcggcgcctgccgccccgctgtcagccttgcctgcaataagccgataatgtccttatcggctttttttatttctttccgcaccgctaatgctctcttcgcagggcccgttgacccctgcccctcgcgatgccacagtactatcccgaaaataacaacgttcaggataaacgtcctgaaaatggggatgatgatggagaaacgcttaccagggctggatctcgacgccctgcgcagctttgtgaccggcatggagtgcggcagtttcgcccaggcagcgctgcgcctgtcgcgttccacctccgcggtcagcgcccagcttaaaaagctggagagtcagtgcggtgcggcgctggtgaccaaacaggggcgccatctggtgctcaccgcggaaggcgaaaagctgatgagctacgccagacgcctgctggcgctcaatgatgaaaccctgcgcgcgctgcagggtgagcggctcaccggcgagatccaccttggtatgcaggaagattttggcgaatcgctgatgccggagatcctcgggcaatttaaacggcatcatccgcaggtgcggatagtcgccagggtggatcgcaatggtccgctgcgccaggcgctggcggaagaggcgctggatctggcgctgctgtggcaaaccgaagatcagggttccgggctgggcctctgcccgctggcgtggattgcgcatcctgacctggatattcgcgctctgctggtctccggcgagccgctgccgctggtgatgttcgacagcccgtgcctgatgcactcccgcgccattgcctgtctcgatgccgcggggatcccctggcaggtggtgttcgtcagccacagcctgagcggcatctgggcggcggtgcaggccgggctgggcctgacgatacgcacccgcatcggcatgccaggcaacctgcgccctgcaggaggactgctgccagcgccaggaagtctggccgtcagcctgcgacaaaccccgcgtgaggaacaccattccgccgccgtggcgctgctcggcgaactgatgaccgaggccctgcagggatggctcgacaggtgacagtgtcacgccatttcattcaccctcaccctaaccctctccctgaagggagagggaaccgttcggcagccaccgacaatgagcatccagcgcctctcccgcttcaatgcccggtggcggctgcgccttaccgggcctacacgcggctccgtaacgatgtaggctgggcaagcgcagcgccgcccggcatcaggtataagggctggagggttccgtccgccagacgcctgcgccgcgggtcaggctttgctctcctgcagcagctgctggatcacctgctcctggcgggcataatccccttcgccgaatgcggtataacgcagctgtccgcgagcgtcgaaaatgtaatgcgccggccagtactgattgccgaaggcgttccagatggcgtactcattatccgccaccaccgggtaggttatccgccagtccttcaccgcctggcgcagcaggggcaacgaacgctcccagggatattccggggtatgaacgccaatcaccaccaggcccgccgcgcggtatttgttcgcccagtcgcgcacgtaaggcagggtatgctgacagttgatacactcccgggtccagaaatccaccagcaccactttgcccttcagacgctccggagttaacgccgggctgttgatccatgcgctgccccccgccagagagggcatcgcgctgctgggctgcggcgcggcgatcggctggaggctggtcttttgctccggctgcggcagacgggcggccagccgctgctccagcgcctggctcagtccaccagcgctttgcagatagcgatcgccgccgctggcgatcagcgccaccgaggccagcattgccccccctgccaaccggcgcagccgttcgccgaacgcctgtccgcgacgcaatctggcgatcaacgccgccccgcaccaccccagcaggaataacatcagcgccccgccgctgccgtaggccagcagcaagccgccggtagtcgcctgccccggatgcacaaagcccaggctaagtatcgcccccaataccggcccggcgcacggcgcccacagcaggcccaccgccagcccggccagcagagaaccgatccagccgcgctggcgtgaactggcatcgttaagctgattccccaacgctaccaggggtgaggtcagccgttgcgcgacgcgttgcgaaagcagactcagcccgaccagggcgaagaacgccagcgccagaccgcggcctgcaagggtcagattcaccacccagccgctggcgaccgtcaccagccaggagacagcgccgaacatcagcgccattcctgccagcatgatcgccagctgcccccggcggccccggacgctggcgaacagcagcgggatcaccggcagcgtacaggggctcagcagggttaacattccgcccaaaaatgcaattaatatcgacatcgccttctcctcattatgccgtcgctgccgagagtggcagccacgacattacagcaaggccatgtaaggcgaatgtgtcgggaaagggggagaattgtcggcttagttatccgtctttcccggagatacagcaggatacaatcccgccgcggcaaggcgaacgctggcgtccaggccgccctgcgggcggttggccaggcgcagcgcgccgtccatctggctgaccagctgcgcggcgatcgccagccccaggccggtgccgccggtatcgcgattgcgcgagtcctccaggcgataaaacggctgcagcacctcctgcagcgaggcctccgggatccccggcccctcatccagcacatgaagggtgatatcccccacggcgtcacgggtcagggttaccgtggccgtcgtaccgaatttcaaggcgttatcgataagattggtcatcacccggcgcagagcctgcggcgggatccacaccaccccggcggtctcttcgggacaaaactggaccggccggccgacatcggcataatcgcagacgatggtgtcgagaaacgcatcgagattcagccgctgtcgcgcctcctccagcggctgcgaggtgcgggcgaaggcgatgccctcccgcaccagacgggtcatattgtcgagatcctgcagtagcttatcgcgcagttccggctggtcggccatctccacccgcagcttcattcgggttatcggggtttgcagatcgtgggagatggcggcaaggatccgcgctcgctcctgcagatgatcgtggatgcgcgcctgcatcgcgttaaacgcgcgggcggcgcgacgcacctcctccggcccctgctcggccatagttcccgccgtgtcgctggccggctccagggcatttaccgcgtgggtaaagcgggagatgggcagcaatacctggcgaaccgcgtaccaggcgcaggccagcaggaggacaaactgagcgatcagcaccaccggcagccagcgggcgatggccggtagtttcggccacaggtcgagggtcaacggcgcgccgtcgtgaagggtaatatgggcctgaatatgctgccgcgggccggggatcgccacaatacttaccggatactgcgcgctcagcgcctcctgcagggagcgcgctgcgtcccgggcgcgccagctgtccgggtaatcgccgcgctccccggcgtccagcagatagcgataattgccgcgcgccagcttcggcagccattgtgggcgctcagcggccggcaggcggtcaaggatcgccacgctggtggcgacatcggaagccagattgcccagcatcacgctgcgagcgctgctcatacgctcataaaacagcagcgacagggttaaggtattcgccagcagcagcgccagaaacagcagcgccatcagcctcgactgcagcgaggcgggccagaacctcattcatgcctctcgcgaatggagaccggtaccgacagcacatagccttcgctgcgcaccgttttaatgtaggccggctcgcgagcatcctcccgtagccgctggcgcagtcggctcaccagcaggtcaatcgaccgctcaaacagttccgcgtcgcgtccctgggtcagattgagcagctgatcgcggttcagcacccgctggggatggtcgagaaacacccgcagcagccgatactccgccccgctgagggcgacaatcgccccgctgtcgtcaagcaaatggcgagcggcagtgtcgagcagccagtcgccaaaggcgatcagcctgcccgcctcggtgatctgcaggttgggcggcagcgcccgggtgcggcgtaaaatagctttgatgcgcgccagcagttcgcgggccacaaagggcttaatcagataatcgtcagcccccatttccaggccgaggatccggtcgctgtcatcggtgcgggcggtgagcatcagcaccgggatatcctgctgcgggttggcgcgcagctggcgacagagcgttaagccatcctcgcccggcatcataatatccagcacaatcaggtcaatttgatggtttttgagtaccgaccacatggctttgccgttcgccgcgccgctggcgcgatatcccgatttttccagatagtcgacaatcagttcccggatgtcgcggtcgtcgtcgacgaccaggatgtggtcaatacgctccaaaggctgctcctggggcaaaataaactcttcacaagcataagccgtgttgccggaagcgcaacgtcgcgccgccggcaaggcgccggttacaaacgatcggcgtccaccaccgcctgcacaaacgccgtcggatcctcctgcggcgggttatggcccaccgctcccggcagatcccggtgctcatatttaccggtaaatttggcacggtagctggcgggagccggatgcggcgcgccgttattcgccccttccagggtgatggtgggcacggttatcggcggtagcgccgccagccgttgttcatagccggcatacttcgcttcccctttctccagccccaggcgccagcggtagttgctgatggtgatcgccacatggtccgggttatccagagcccgggcggttttggcaaaggtcgcgtcgctgaattgccactgcggcgacgcctgatgccagataaatttcgcaaagtcgtgggtgttttgccggtaaccggcctccccacgcggagtggcaaaatagaattgataccaccacgacagctcagcctgcggtggcagcggtttttcgccaatctgctgactgctgatcagatacccgctcaccgagaccagggatttcacccgctgcggccacagcgcggcgacgatatccgccgtgcgcgcgccccagtcaaaaccggccagatccgcctgcctgatgttaagggcgtccatcagatggacaatatcggccgccatcgccgacggctgaccgttacgcggcgtgctggcggagaggaaacgggtagtgccgtagccacgcagatacggcacgatcacccggtaacccttctgcgctagagccggcgccacctgggcatagctctgaatgtcgtagggccagccgtgcagcaggatcaccggctggccgtcgcgtgggccgatatccacgtagccaatattcaggtcgccggcgcggatctgctggatcttgtcgaacgcccccgcgtcttcagcggcgcaaacggcggcggaccacagggtggataaccccagcgccacggcgctggtatagcggatcagggataatctgttcatcgttttctcaccttttatcgtcatcaagagagtacgtgaccagtaaagcggaaatttgtatccgccatgtgcccgaccggggccatttttatctcttaatgtcagcgctgcgccgcgagatacagtgtgatacaaagtcgaagttggcaattgttgcgggcatgtgaatttatgcttgccccgggagataaatccgttaccgtggcaggcatttttcaccacttaagaacgcaggaacccgctatggcgatttttgatggtcacaatgacctgctgctgaatctctggcttcaccatcgcgaggatccggtgagcgccttctttgccgggattgagaacggccatctcgactatccgcgcatgctgcaaggcggatttgccggcgggctattcgcgctattcgtgccaccgcaggaatatattgcccgtatgacgccgcaatacgccagccaacgatgggatccgatcgatatcctctggcagcaactggccatcctgaagcaacttatcgcgcactccgctggacgcttgagattgtgtctgagcgcggcggatatcgaacgctgccgcgaggataaggtactggcgatggtggcgcatattgagggtgccggaggttttgatggcgagggccgcgacctgcaggccttttatgccgccggggtccgcagcattggtccgttctggaatattgcgaaccgcttcggcagcggcgttaacggttcgtttcccggtagcccggacactgggcctggactgacagcggcaggtatcgatctgattaagcaggccaatgccttgaagatgcagattgacgtgtctcatatgaatgaaaaagcgttctgggataccgcccatcactcaacgtcaccgctggtggccacccactccaatgcccacgccctgtgcccgcagccgcgcaatctgaccgaccagcaactgcgggcgatccgcgacagcggcggcgtggtgggcgtcaatttcggcaatgctttcctgcgcgccgacggccggcgcgatagcgacacgcccttaaccaccattgtccggcatatcgactatcttattaacataatgggtgaggatcatgtggctcttggctcggattttgacggcatcaccctgccggacgagctgggcgatgtggccggcttaccgcggcttatcaatacgttgcgcgctagcggctatgatcaattggtgctggataagctgctgtggcgtaactggctacgggtattaaaaaatgtttggcaacaataggttatattgtaaacataaagttaattccttacagattccgggttgatctctctcccggtgaagcgcaatatgcggcagccgtcacagatccaccattatccgtgaggcctgtagtcatttttaagaggaacaaaacatgtggaagaaacctgcttttatcgatttacgtctcggtctggaagtgacgctgtacatttctaaccgttaatcgccccgcccgccgttcgcgcgggcaccttcattcattacccggtccgtcttcatgttcattaaagtcctcggttccgccgccggcggcggtttcccgcaatggaactgcaactgcgccaactgtcagggtctgcgcgatggcaccattcaggctgccccccgcacccagtcgtcaattatcgtcagcgacaacggtaaagagtgggtgctgtgcaacgcctcgccggatatcagccagcagattgcccatacccccgagttaaataaagccggcgtactgcgcggaacgcatatcggcggcattattctcaccgacagccagatcgaccacaccaccgggttgctgagcctgcgggaaggctgcccacatcaggtctggtgcaccccggaggttcatgaggatctctccaccggcttcccggtgtttaccatgctgcggcactggaacggcggcctggtgcatcatcccatcgctccgcagcagccttttaccgttgacgcctgtcctgatttgcagtttaccgcggtgcctatcgccagcaacgcgccgccctattcgccgtatcgcgaccggccgctgccgggtcataacgtggcgctgtttatcgaaaaccgccgcaacgggcagacgctgttctatgccccggggctgggtgagccggatgaagccctgctaccgtggctgcaaaaagcggactgtctgctgatcgatggcaccgtctggcaggatgacgagctgcaggccgccggcgtcgggcgcaataccggccgcgatatgggccacctggcgctcggcgacgagcacgggatgatggccctgctggcctctctgccggcaaaacgcaaaattctcattcatattaataacaccaacccgatccttaacgagcagtctccccagcgccaggcgctaacgcaacaggggatcgaagtgagctgggacgggatggcaatcacccttcaggataccgcatgctgatcactgacacgctgtcgccgcaggcctttgaagaggctctgcgggctaaaggcgacttctaccatattcaccacccttaccacatcgccatgcataacggcaacgcgacccgcgagcaaattcagggttgggtggcgaaccggttttattaccagaccactattccgctgaaagacgcggcgattatggccaactgcccggatgcgcagacccggcgcaaatgggtgcagcggatcctcgaccacgacggcagccacggcgaggacggcgggattgaagcctggctgcggctgggggaagcggtcggtttgagccgcgacgatctgctcagcgagcgtcacgtgctgcccggtgtgcgcttcgcggtggatgcctatcttaatttcgcccgtcgcgcctgctggcaggaggcggcctgcagctccctgaccgagctgttcgccccgcagatccatcagtcgcgcctcgacagctggccgcagcactatccatggatcaaagaggaaggctatttttacttccgcagtcgtctgagccaggctaaccgcgacgttgagcatggcctggcgctggcgaaggcctactgcgacagcgctgaaaaacagaaccggatgctggagatcctgcagtttaagctcgacattctgtggtcgatgctcgatgccatgaccatggcctatgccctgcagcgcccgccctatcacacggtcaccgacaaggcggcctggcacacgacccgactggtgtaatcatgcagaaaacgtccatcgttgcctttcgtcgcggctaccgactgcagtgggaagccgcccaggagagccatgtgatcctctatccggagggtatggccaaactcaatgagaccgccgcggcgatcctcgggctggtcgatggccggcgcgacgtcgcggcgattatcgccatgcttaatgaacgtttcccggaagccggcggcgtcgatgacgacgtcatcgagttcctgaagatcgcctgtcaacagaagtggatcacctgccgtgaaccagagtaaacccaccgtcaatccgccgctgtggctgctggcggagctgacctaccgctgcccgctgcagtgtccctactgttccaatccgctggacttcgcccggcaggataaggagctgaccaccgaacaatggatcgaggtctttcgccaggcgcgggcgatgggcagcgttcagctgggcttttccggcggcgagccgctgacccgtaaagatctgccggagctgatccgcgccgcgcgcgacctcgggttctataccaacctgatcacctccgggatagggctgacggagagcaaactggacgccttcagcgaggccgggctggaccatatccagattagcttccaggccagcgatgaagtgctcaacgccgcgctggccggcaacaaaaaagccttccagcagaagctgaccatggccaaagccgtgaaagcgcgcgactacccgatggtgctcaacttcgttctccaccggcacaacatcgaccagctcgataaaattatcgagctgtgcattgagctggaagccgatgacgttgagctggccacctgccagttctacgggtgggcgtttcttaatcgcgaagggctgctgccgacccgggaacagatcgcccgcgccgagcaggtggtcgctgactaccggcagaaaatggccgccagcggcaacctcaccaacctgctgttcgtcaccccggactattacgaagagcggccgaaaggctgcatgggcggctggggatcgattttcctcagcgtcaccccggaaggcaccgccctgccttgccacagcgcgcgccagctgccggtggcatttccgtcggtgctggagcagagtctggaatcgatctggtatgactcattcggcttcaatcgctaccgcgggtatgactggatgccggagccgtgccgctcctgtgatgaaaaagagaaggacttcggcggctgccgctgccaggcctttatgctgaccggcagcgccgataacgccgacccggtgtgcagcaaatccccgcatcatcacaaaatcctcgaggctaggcgcgaagcggcctgcagcgacataaaagtcagccagctgcagttccgcaaccgtacccgctcgcagctgatctaccaaacccgggacctgtaatgacgctggcgacccgcaccgtcattttgccgggcggcctgcaggccaccctggtccatcagccgcaggcggatcgcgcggctgccctggcgcgggtcgccgccggcagccaccacgaaccgtcgcgcttccctgggctggcgcacctgctggaacacctgctgttttacggcggagagcgctaccaggatgatgaccgactgatgggctgggtgcagcgccagggcggaagcgtgaatgccaccaccctggctcgccatagcgcgttctttttcgaggttgccgccgatgctctggctgatggcgtcgcgcgtctacaggagatgctgcaggccccgctgctgctcagggaagatattcagcgcgaagtggcggtgattgacgccgagtaccgcctgatccagcagcatgagccatcgcgccgggaagccgcggtgcgccacgccgccagcgcgcccgcggcgtttcgccgctttcaggtaggcagcgccgacgcgctggcgggcgatctcgctgcgctgcaggccgccttaggcgattttcaccgcacccattacgtcgcccggcgaatgcagctctggctgcagggaccgcagtcgctggaggcgctcggcgagctggcggcccgtttcgccgccgggcttgccgcaggcgagcctccgccgccggcgccgccgctgcgcctgggcgagttcactgcactgcagctggcggtctccagccagcccgcgctgtggcgctgcccgctgatcgctttaagtgacaacgtcacgttactgcgcgagtttttgctggatgaagcccccggcagcctgatggccagcctgcgccagcgccggctggccggggatgtggcgctgaactggctgtatcaggatcggtacctcggctggctggcgctggtcttcgccagcgaccggccggaagaggtcgaccggcagataacccactggctgcaggcgctacagcaaacgacgcctgagcagcagcaacactactatcagctatcccgccgccgctttcaggcgctgtcgcctctcgatcagctgcgccagcgggcattcggctttgcccccggcgcgccgcccgccgggttcgccgatttttgcgccgccctgcaggccgccccgtcggtcagcctggcctgtcaaaccgtttccccaggggagcctgttgccacccagggctttagcctgccgcttagccgctggcgccgccgccctgagtctgacccggcgctggcgttcgctttttatccgcaggccgctggcgatctcgttgccaaatgcccggagaaagccgcgccgctgctccatctcccgttaccggaagagccgccgaggctcctgctgcgaccgcccttctactgctcgcccgatcaggccgaaggactggcgcgtggggaacagctgcgcccactgcttgccgccctgcgccatgccgggggacacggcgagtggcatctgttcgacggcagctggcagttgaccctccagctgccggagccaggccgacggccggaagcgatcctgcaggccatcctgcggcagctcgcgctcccggtcgcctcgctgaccccaccgccggaaagtatcgctatccgtcatctcatggctcaactccccgaacggctgggtacatccgggcatcagaaaggttggctggcggccctggccggcggcagcgcagaagatgcgcagtgggtagcgcgtcagctgagcctgattaccgccccggttaatccgccgatgcccgctccggcaccctgccgccgcggcgtcgaacgtctggtttatccgggaggcgatacggcgctgctggtcttcattccgctgccggatggcgcctcgctggcggccctgcggctgctggcgcagcattgtgagccgctatttttccagcgcctgcgggtggagcagcagattggctatgtggtgagctgccgctatcagcgggtcgccgatcgcgacgggctgctgatggcgctccagtccccggatcgccgcgccggggaattgctgcgctgtggtaaagactttctgcgccagctggcccccatggatgaggcgaccttcagaccgctacagcagcgcctggccgctcagaaccgcgccagcaggccgccagaggcgcgggcgctgtccgccctgcgtcaggagtatggattaccagagctaacgccgcaggcggttgacgcgctgcgcgttgcagaggtggccgatctggcacgcgaaatgacccgccggcgtcgccgctggcaggtgctattcacgacaggggattaatggccggggacatccggggtcagaaaggcgctgacgaagcgcgtaaggatcgccgcgccctgcgggctctcctgcacctcgtcgtgtaaccgctgcgcgtcaataccttccgcctgcagcaccgcctcccggtggcggatcagcgaacgggctatcggcgcggtaaattccgggtgaaattgcgtagagaccgcgtgcggcccatagcgcacaatctggtggggatcgtgggcggacgcggccagcaccgtggccccttccggcagacgagtcacggtttgcaaatggctcagatgcgcaggaaatgtagccggcaggccgctcagcagcggatcatcgacaccccatggcgacagcgtaatggtttggctgccgctttcccgcccgccaggatgatacgccacctcgccccccagggcatgggccatcagctgatgaccatagcaaacgccgaacagcggcatgtcgatagccaccgcctgccggatccagtcggcggtccgttcgctccacgccagacgatcggtcaccatcgcccacgagccggttagcaccgctatggtctggttatccggcgtcggcagcggttcatcttcaaacacccgcaccgtggtgagctgcgtctgccacggcgccagcagcgtgcgaaaccagcgcggcagatcgccatgcgcctggcgaatggccgtcggcggcgtgccggtctggaccagcagtaatcggttacgtgtcacctttcctcctcgctccgggtcatgttcccgtaaaacactatgccgccgggaagacgatgggacaaataaccaattactatggacgatgcgcctgcggaataagtcctgtcgcttactgggcatcggcgctatcacgctgcggcacatcggctgccgccgaagatgcctgctgcgggacaaaaatatggtccaggatggcgcgcgccgtcggtccggccaccaccccatccccgccgccgttctccagaatcagcgccatcgccaccttcggatgctgataaggggcaaacagggtgtagaagatatggtcgcgcagacgcaccgggatcattttggcgttataggtctggttttgcttcaggctaaagacctgcgaggtcccggacttcgccgcgatctgatacggcgcagtatgaaacagcttatagccggtgccgttgggctgattcgccatcccatacatgccgttgcgcacaatgccccagtacggggatttcgggtcacccacctgcggcaggttcgccggctgctgataacgttccacatggttgccctgcttcatcgaatagagcagatgcggatcctgtaccttaccattgttcagcagagtggtaagcgccttcaccatctggatcggggtggcgatccagtacccctggccgatgccgaccgagatggtgtccccctgataccagggctttttatgcacccgctgtttccactcccggctgggcagcaccccggcgtactcctcattaaggtcgatgccggtggactggccgtaaccaaacttgctcagccattcatggatccggtcaatgcccatctcgaaggcgacctgatagaaaaaggtgtccgctgactcttcgatggctttagtcacgttgagcatgccgtggccggttttcagccagtcgcggtagcggcgttgcgtgcccggcagcgtccacgtcggcgccccgaagaaggtggtgttcggggtgatgaccccagcggagagcgccgacagcgccatatagggtttgaccgtcgaagccggaggatatagcccctgggtgacgcggttgatcagcggccggtccggattctccagcagcgatttataggcctgatagccgatacctttgacgaacggattaggatcgtagctgggactggagaccatcgccaacacgccgccatcccgcgggtcgaccaccaccaccgccgcccgctgtcccttcagcaccgactcaatatactgctggagatgaaggtcgagagtcagatagaggttttttccggccaccggcggcacctctttcagtagacgcaccacccggccgtggttatccacctccacttcctgatagccggtggtgccgtggagcgctttttcataatagccctcgatgccctgcttaccgatattgcggtcggcggcgtagttctcctcttcgccgtttttcgccagccgctgcagatcgctgtcgttgattttcgacacatagcccaccacgtgcgccagctctgcgccgtaggggtattcccgttgttggtagctctccaccgtcacgccggggaaacggaattcgttgaccgcgaagcgggccacctccacatcgctgaggtctgacttgagggtgaccgctttgtagcggctggtgtggtgcatatcgtcgcgaaagctggcgatgtcgtccggcgtcaggtcgacgataggcgtcagctgctgcaacagcgcggccatatcgggaattttgctcgggatcacctgcaggcgatacagggtgatattctgcaccagcggaataccgttgcgatcgaatatcagcccgcggctgggggcgatgggcagcattttgatgtcgttctggtttgaccgggtctggtaaaaatcgtgctgctccacctgcagatggtagaggttaacgatcagcacgccaaagcagaccaccaccagcagaaaagcaattgcggcccggcggataaacagcatctcttccgcggagtggtcgcgaatttcatctctcaaaaggggcattagcggtacatcacctgaatcactggaaaagccaacggcgtaacggccgggaagcatagccttatcgcagcgtcagccctactgaaaggttgctaatgatctggcagaaatgtttcagcatgttagagggatcgttattcttaaccttgcccgtgacgcgtcaggctatgttcacgatgcccgacgcgtcggcgcggctcactgttctgcgcgggccgcctcgtgggaggtagccgacttccctgaggtgtagattaagtacagcgcgagggccagacatatcaccgccgccagtcgcgccggcgagaacgccatcgtgctgttgcccagccagccaaagttgtcgatcagcaggctcatcgtcagctggccaaagatcaccgccacggtagccgtagcggtgcctatccgctgcaccgccagcaccataatgacgatgtagggcacgccgcaaaaagcgcccagcagctgccacttaggcacctgtaacaggtttaccgacgtcgctggagcaaaaaacaggatcagcaatcccgtcaccagcgcgccggtagcgaaggttaaaaaggcgctgcgcagcacccccacctggctgccaagacggccatttatcgccgcctggacgctaagcaatgcgccgccgcacagtgccagaatgatcactatcgtatccatttcccctccttaacccagagccaccagcaataacgccgccataatcaacatcagcgccatggcgcgccgcggatcgattttgcgccgtgggctgccgaataacccgtaatggtcgatcgccaggcttttcgccacctgccccgccaggatgccgatcatggtcatggcaataccaatcactggcgtcgccatggtcaagatcaccacgtaccccgcccccaacagaccgccggtgagttgccagccgggcagagaaaagaacgacgggctgctacgcgggctgaaaaagagcatcagaaaaaaggttaacactgcgccaatcccaaagatgctcatggttgcccacagatcccccacctggctcgccagcggccccagcaggccggcctcgaccgataatcccatgccgccggcaatcactaataaaatgaataataacgccattactgcgcctcctctgtacaacaggcggctgaggataaaacagcgtgctgatgcgataaacggtataatgcagaaaacactattgcaggaattgcacagatggccgatgccagcagcgtcgattttcgcgcccttcagcttttcatcgcggtttacgataaccagagtttttccgtagtggcccgccgcgaaggggtctctccctcgctgatctcgcgaaccatccagcagctggaagatgccctcgggcagcagctgttctaccgcaacacccgtgccgtggtaccgaccgaagcaggacgctttttcgcagcgtccgcccgcgaactgctgggacagtacgccgacgcgcaacgggcgttacaggatcgggcacaggtccccggcggactggtgcggatcaatgcgccggtctattttggtcagcgtcatatcgccccctggcttccggaactggcggcccggcatcccaaactgcagtttgacctgacgctgaccgacgattttatcgatccccatcgcgatgcgacggatatcctttttcgcatcagcagcctgccggacgcgggctatcacgccagagtgtttggcagccagcgctattacctgaccgcctccccggagtatgtttcacggtacggcagcccgacttcgccggaggcattgcatcaacatcgcacgctggtgtatggcggttcgcagggagccaaccgctggctgtttcgccagcgcgaagaggcatgggtgcactatccgttgaccccgctcatgacctcgaacaatgccgatgccctgctcacttcagccatcggcgggatggggatcgtgttatttcccgactggatggtcagcggggcgctgcacaacgggacattagtcacgctgatggatcgctattcggcggccatcagccacacgccatcgtatatcgcggcgatttatccttatacccgccatccctctctcaacgtgcggacagtgattgactattttgccgacgtgtttggatcgccgccctactggcagcgctaatgcgagattcgtagtaaaacttgtcatatctcaaacaattagcattccttcgcccagcttgacgcgaatcgtttcctttgccgcctcgttacggctatggttactaatgaggttaatctcaatctccaggccgacacggtcccaccagggggttgcctaacccttcattgaacggaaatagctattaaatccgtagattcattcaaatatcgcttattggtagcagtgtatatcgtaacggcattcacaaaagcaaacggagcctgatatgagcacgtctaacgacccatccaacaatgcatccgccgggaagtgccctttccacgccgagacgccaaaacagagcgccggcagcggcaccgccaaccgcgactggtggccgaaccagctgcgtgtcgatctgttaaaccagcactccaatcgctccaacccgttgggtgagaattttaactacagggaagagtttaaaaagctcgattactccgcgctgaaggctgatctcagagcgctgctgaccgattcgcaagagtggtggccggcagactggggtagctatattggcttgtttattcgtatggcctggcacggcgccggcacctaccgcaccgttgacggtcgcggcggcgcaggtcgtggacagcagcgctttgctcccctgaactcctggcctgacaacgtcagcctcgataaggcccgccgtctgctgtggccggtgaaacagaaatatggccagaaaatctcctgggccgacctttacatgctggcgggtaacgtcgctctggaaaacgccggcttccgcacctttggctttggcgccggtcgcgaagacgtctgggaaccggatctcgacgtcgactggggcgatgagaaagagtggctggcccaccgtcatccggaaagcctggcgaaacaggccatcggcgccaccgaaatgggtctgatttatgtcaacccggaaggtccgaacgccagcggcgagccgctgtccgccgcggcggccattcgcgccaccttcggcaatatggcgatggacgatgaagagatcgtcgcgctgatcgccggcggccatacgctgggcaaaacccacggcgccgcagaaaccagccacgtcggcgccgagccggaagccgcgccgctggaagcgcagggtctgggctggcactccagctacggcagcggcgcaggcgcggacgccatcacctccggtctggaagtggtctggacgcagacgcccacccagtggagcaactactttttcgaaaacctgttcaaatacgaatgggtgcagacccgcagcccggctggcgcgatccagttcgaagccaaagacgcgccggagattatcccggatccgtttaacccggagaaaaagcgcaaaccgaccatgctggtcaccgacctgaccctgcgcttcgacccggagtttgaaaaaatctcccgccgcttcctcaacgatccgcaggcctttaacgaggcgttcgcccgggcgtggttcaagctgacccaccgtgatatggggccaaaatcccgttacctcgggccggaagtgccgaaagaagatctgatttggcaggatccgctgccggcagcgacccatcagccgagcgcggaagatatcgccagcctgaaaaccgccatcgccggcgccggcctgtcggtcagtgagctggtctcggtcgcctgggcgtccgcctccaccttccgcggcggcgataaacgcggcggcgctaacggcgcgcgtctggcgctggccccgcagaaagactggccggttaacgccatcgccagccgggtgctgccgaccctgcaggcgatccagcgcgcctccggcaaagcgtcgctggccgatattatcgtgctggccggcgtggtcggcgttgagcaggcggccgctgccgccggcgtcagcgtcaatgtgccgtttaccccaggccgcgtcgacgctctgcctgagcagaccgacgtcgagtcgtttgatctgctgcagccgctggcggatggcttccgcaactatcgccgtatcgaaggcggtgtctcgacggaaaccctgctgatcgataaagcgcagcagctgacgctaaccgccccggaaatgaccgtgctggtcggtggcttgcgcgtactgggcgcgaactacgacggcagcaaacacggggtgtttaccgaccgcgtcggcgtgctcagcaatgacttcttcgttaatctgcttgatatggctaccgtctggaaagcggccgatgataacgcggagctgtttaccggcagcgaccgtaaaaccggcgaagcgaagtacagcgccacccgcgtggacctggtgtttggctccaactcggtactgcgcgccctggcggaagtgtacgcctgcgccgacgggcagcagaagctggtacatgacttcgttgccgcctggaccaaggtgatgaacctcgaccgcttcgatctgtaatcccctcgccccggctcccgccggggcgtttttcttataccgcccgcggcagctgttgcaggcgactccgcgttcgttgaatatcctccagttccacccctgccaccagcgtctccaggtcgcagcgggtcaccagcagcaggcggatctgcttttcgtacagcacatcaatcacattgataaagcgctgctgggccgccggccccaccgtagccaatggcggcacctcgtccagtagccagacggcatagctttcgcagagcgtcagatagtccatcaccgccgtggcggcctgacaaagctgggtaaaggtgaagtgcagcaacgcgggcgacgccgcggccgccagcagcgtgcgatagcctaccgtcagcgaaaccggttcgccaggcagcgacggcaggtcatacagctgacgctgttgtgcattcggattaacccacatccgcccgctgcagaaggcgttatcctggctcagatgccgttcgcgataatcctcctcgccgttcagcgccaccaccgttagatgggcgcggatcagcgcgatcgacggtaaaaagcgatcgtgatacagcggattgggcagcagcatctccggcgggtagtttgaggtggccagcagcacgataccgtgttgaaagaggtgttccagcaaggctttaatcagcatggcgtcgccggggtcatgcagatgaaattcgtcgaagcatagcaggcggcaaccggatgtcatctgcctcatcaccgtctgcaggtcgggcgctccgggggcattcagccgctggtgcagttcgcggaagaagtgatgaaaatggacccgccgcctggcggcgagcggcaggctggcgaaaaagtggtcgaggataaagcttttccctcgcccggtacgtccccagacgtataccccctgcggcctgcctgtcgtggacaccaactgctgaccgagggcgtcaaggcgggcgatgagtgacagctgatcgtcgtccagcgtcagacgcgcccgcgccgcctgctcggccatcacgcgggtaaaacgaaaatcagccgtcacctctgtgggaccagattccgagggtacacatccattatttaacattcttataacctcctgcgaggaggccattctagccgctttcccgcgggatggcgaatcgcgcgacgagcggccgtttccgctgctccgccgccagcccctacgcctctccgacacgccagtgcaccgatgtgacgttctgctgaacgcccatctgcgccataatttgcgccagcgttttttggtgctgcttatggctaatcagctgcgcgcaaatctccagatggtccgcggtgtccgctgccgccgactgcaatccctgcagggtaaaccgctgctgctgcgcaatattcagcaacagctggcgtacagcattttcatgttcgcgcagacaggtgacgcgtaagacatagcgtttctcttcgtcaccggcccccggcaaggcatgaatgcgctgcgccgcctcgcgcaacaggatattggcgcacagaataatcagcgtagccgccgtcgcgttccagaactgtcccaggccgcagagtacgccgatcccggccgaacaccacagcgtggcggcggtattgaggccgcggacgttcataccatcgcgcataatcacccctgccccaaggaagccgataccggagacgatctgcgccgcaatacgccccgggctgtccggcgaggccgacatcgcgctgagaataaacaccgccgcgccggtggccaccagggcattggtgcgtaaaccggccatacgttgccgccactgtcgttccgcgccgatcagcgcccccaacaacattgccgcgagtaaatgagtcatataaggaaataccatcgcgccttcctccagaaaacagaaagccaaaaattacagatgtagcgctcagccgcgccgggcgattagccggtggatgatggtggaggaaataagggtctggaaaacataaacataacgctgcctctcgcgctcaatggcgcataaattattgagggaggcaatccggaactgagagattgctgcccgccgggacggcaagcagcgaaatgatcgcgttagcttgccggaaaatcgcaataagggtgactgtccaacgtatgactcctgaataaaagtgggcacattatagccctgggtaatgatgggtaaagcacgaaaacgccgccggtgacgattcgtttagtttgtctttcgcgggtcctgcgtagcgtgacatcgccaggcgactaaaatgccgtcagcggtgatttacttcaattccgtcgctgggatgcggcgaaaaccagcatgaatatcatctttatgtctccccagcgcgatcttacgctaaagaatgtcgctaaggctaaggattaaaaatttaaaactattaacaatcaattaacattagcaggcaaaccattcttcctgaggaacacaacaccatgtctaccacccaggttctcggcgaaacgccctatgcttcgccaggacaaccgcacgccagcttaaccggacgcattgatgcgctgcccgcctcatttgggttatggtcgtttattaccctgctctcacttggcggcttctttgagctctacgatctcttccagaccgggtatatcagcgcgggcctgctggcggagggcattttccacaccggacaggcgggcatcttcggcatcgccgaccaggcggccttcgcctccgccacctttatggggctgtttatcggcgccagtctgctggcgccgctggcggacaaactgggccgccgcctgacctttatggtggcgctcgcctggtacggtcttttttcgctgctgatggcgacgcagagtagcgcggaaggggtgatcttcttccgctttctggtggggatcggcctcggcattgagctggtgaccattgatacttacctcagcgaatgggtgccaacccatctgcgcaataaagcctttgcctttgccttcttcatccagttcctctcggttccggcggtggcgctgatgtcctggatgctggtgccgaccaccctgttcggcctcagcggctggcgctgggtgatcatctttggcgcactgttctcgctggcgatctggtttatccgcaaaaagctaccggagtcagcccgctggctggaaagcaaagggcggcatgatgacgcgcatacggtgatgtgtgagatggaagcccgctgcggcctgacgccgtcgccgaagcatgcgcatgcggcacagagcgtcgtcaaacgcggcaccttccgcgaaatctgggcgccgcagtatcggcagcgcaccctgatgctgatggtgatgaacttcttccaggcgatcggtttcttcggctttggcaactggctgccggcgctgctctccggtcagggcgccagcatcacccatagcctgctgtacgccttctttatcaccctcgcctatccgctgggctgtctgttctgcacccgcttcgtgcatcgctttgaaaacaagtggcagattgtcctctccgcgctgatgaccgttatcttcggcaccctgttcgctctgcaaaacagtccgatcctgttggtgatctgcgggtttatgatcacctggtccaacgcctggctgaccatcagctaccacgcctaccaggccgaggtcttcccgacccatattcgcgcccgcgccgtcggcttctgctactcgttcagccggctctcgaccgcggtgaccagcattctgatcggcattattctgcaatacgccggcacgccgggagtaattagctttatcgtcgtcagtatgctgatggtgatgctgtcggtggggatcttcggcccgagaacgcggggcattcgtctggagaatatctgatggcggtcgccgccgagggtgccggcggcgacatattttatcagttgcgatgttgcagctggcgctgaacctcaataagctccgcgatcaactcccgcgcaagcatagaggtcattatatgatcttgggcatgtaccagaataagattaaccggtactttgccacagccctcatccataccgataagcatggtttgtacatcatgcgcgcgttttgcggcatctgcggcgtcctgcatcagcctatcaacgtcctgccacactctttttctggcggcttgcagcgcctgcatcgccagactgcgggactcaccggcgttaatgatgagttccatgacggttgcttccatatccatacggtttccctacttgttgagtgaatgacggctgttgccatagttaatatttgtgatgtgtactgcaggagggataaaaaattgtcattaaggcttgtaacttctggacagcattaagcggcgccgcaataccgcttttaccaacggtccagcatcaccggggctatattgacactctcccatcagaggggcgtttaggcattttagtgacaagccgccaggtcggcggcccggcctcagccaaatatcccctgcgcctcggcgaagcatttttccgccagggtcgagactggttcctgctggcgcataatcagcgccagctgtgaatcaacatgggtttcggcgatcggcagaatttcaagattatcgcttagcgcttcgaggccgttgttaagcggcataatggcgcagcagatccccgcctgcaccgcctggataatctgaaacgtcgaatcactttcaaagacatacctcggcgttagccctttggccttaaagctgatttcaatcgattcccggtaatacatccccttggtcagaaagccgaggggcagcgtcgccagcgtctcccatcccggcgtcccggcgctgaagtcgaaatggcgtttatcgtgcagcagtcccatccgggtttgcggcaagcgagcaatcttgaactgaccttcatccagatgctgcagataacagatccccagatccagctgattacggctgacgccatcgataatctgctccgaggtcatcgacaacaggctgaactgcagcgccggatatttctccgccaggggtttaatcaactgcatcggattgaggctcgccagcggcaccataccgacccgcagctggccgaccatctgcccgcgacagatggccgcctctgccgccaggccgtcatgggcggccagcaccgcccgcgcccaggccaggatccgctctccctccggggtaaacccctcaaagcgttggccgcgctggatcagcgtcaggttcagctcctcttccaggttacgaatgcgcatggagagcgtcggctgggtaatatgacaggccgccgccgcctggccaaaatggcgcgtctgatcgagcgcgatcaaatacttgagttgcttaatatccattctctttcccgtttgaaccccgccgttcacccccggggccgcgcacaggttaccagaatgttagtttcgctagcgataaattcaagcgaggacaccacgaggtgctgcggggcgcaggacggcgcaacgccgctctgcgctatacctttttagcgcccgccgaccagcggacggatctctttcgagcgcagcgtcaggcgaacgggaaccgacttatacgaaggggtgccgctctcttcatcgagatagttcagcggcaccagcacgttggcttccggataataggcgccgacggtgcccggcgcaatgccgtaggccaccaccgtgatatcttccagcgtcagcgcgcttcccggcagcgcggtatgaatatccacccgatcgccatgctccagaccctgggcggccatatcctgctcgttcataaacagcacgtcgcggcggccaaagacgccacggtagcggtcatccatcgcgtagatggtggtgttgtactggtcatgactgcgcagcgtcaccaggcgcatcacgtcctcaccctccaccaccacgttctcatgcacccctttaaataccgagaacatggctttaccggtggcggtaggccagatgcgctcggtcggcggcagcggcatgcggaagcctccaggatggcgaatgcgctggttataatcctcgaacccaggaatggtctgttcgatcagatcgcgaatgcgatcgtagtcttccacgaggtactgccagtccactttgctggccggcaaggtggccttcgccagaccggcgacaatcgccggctccgagcgcagcatcgacgaggcgggcttaagcttgcccgacgaagcatgcaccatcgacatcgaatcctcgacggtgatcgactgccggccgctggcctgcaggtcaagctcggtgcggcccagacacggcagaataaaggtctctttcgccgtcaggagatgtgagcggttgagcttggtggcgacgtgaacgctgagctcaaggccgcgcatcgccgggaaggcgcgttcgtggtccggcatcgccacggcgaagttgcccccaaggcagatcagcgctttggcttcgccggcgatcatggcctccagggcttttaccgcatcgtggccatgatgccgcggcggcgtaatccccatcacccgctgcaggctgtcgaggaaagccgcggagggtttttcgctaatcccgacagtgcggttaccctggacgttcgagtgaccgcgcaaaggacagatcccggcccccggcttgccgacattgccgcgcatcagcagcaggtcggcaatcagacgcacgttggaggtgcctttgttatgctgggtgatgcccataccgtaggtgacgatggtggccctggatttggcgtaagccgccgcaacctggttcagggattcgcgcgtcaggccagactcctgttcgatgtcctgccagcgggtggcgtggaggtcatcggcgaaggcggtgaatccctgggtatgttgggcgataaacgcgtggtcgagcacattgccctgctcctcctccagctgcagcagcgctttggcgatccctttcagcgccgccgcgtcgccgccggcccgtacctggtagtaggtcgaggcgatcggcgtcgagcgccgggtcgccatctccattacgttctgcggatcggcaaaacgctccagcgcccgttcacgcagcggattgaaaacgataatcggcacgccgcggcgggatagctcatgcagggtgcccatcatccgcgggtggttggtgcccggattatggccgatggagatcaccagctcggtctggtcaaaatcgtcgagggagacggtgcctttaccaatgccgatcgactgtggcaggcccacgctggtggattcatgacacatgttggagcaatcggggaagttgttagtgccatactcgcgggcaaacagctggaacagccacgccgcttcgttggaggctcggccagaggtgtagaattcaacctcatccggctgcaggccgcggaggatctcgccgatacgggcgaaggcttgctcccacgccaccgggcgcagggtatcgctgtcccggtcgtaaaccaaaggatgggttaagcggccgtagccctccagttcaaaatcgctttttgccagcagggaagaaacggtatttgccgcgaggaatgcgggcgtcacccgtttggtggtcgcctcccaggtcacggctttggcgccgttttcgcaaaactggaaggtcgatttatgttctttatccggccaggcgcagcccgggcagtcaaaaccgtccggctggttggtacgcagcagcgtggcgggcgcctcaaaggcatccatctgggtgcgcacggcgatggccgtggccttcaacgcgccccacccgcctgccggaccgtcataggggtgaacaccgggaaccgcgcgtcttttattggtcatctctttactcctgctgctctgttctggctgtcgctagccgaaaaaggcgtacgacaaccccggcgacgaagcgtgaatcgcatggcgtcacctgaaaagaatgctgtttctcaaggatagtacgatgggaaagcgtaggtactgcgtttgttaactgaataataacatacacctcaattctgtataattgatgttatctatcaggtgttaaatttaacttatttgcaaattttgcggttttcaccgcggtgctgtgacggataaattgctacggaaagtgatgaccgggcagcgaaaccgcccggtgggccaggctcaggtcagattgaagtaacggtccggacgcagcgtctccggcagcggatgctgaccggtcatgtcgagcagattgcgctcgatggtattgcacatcgcgttcaacggcaggtcattggctgcggtgccgaacggatcttccagctcttccgccagcgaatcccacgataaaaaggtgtaagagataaagaccgagacaaacggcgtcatgtagtgcagatcgccgaccagggcgaacggcagcagcgtacagaacaggtagacggtacgctgcaggatcagggtataggcgaaaggcaccggggtggtggccagcctttcacaaccgcccagcacgtgcgccagctcgtcgagtttgttgtccatcagcccgtaagtgatgtcgctgagcttgcccgcctcccgcagctggccaatttcgttgccggccagcagcaggatccggttggtgggcattgagctggcgaggatctccgtcaccctctcctccggtagcaaccgccgcaggtcagccgtcggatcggttttgcgcagctggtgcttcaggctccagctaaaggccaccagatagctgacgatgcggcgatgtgcatcgtgttccgccggcaggatattgcgcagctgacgcaccagcgtgcgttcggcgataagcaccgtcccccacagattgcgcgcctcgacgaagcggctgtagctggcgctgttgcgaaagccgaggaaaatcgcaatcgcaatccccagcaggctgaacggcgccacggttaagtggatccccagctgttcgtaccattgatagctgataatggcgatgatcgacatcagcacatttagcagcaggcgaaagatgattttcgacagcacggagccgtgccagtcaaataggcgaagaaaccagtgttgttctggccgaatgatcattgtctgacttcctgaattaccgctctggtcattatctctgaatacagaatagagattatctatgagccgattggtttattttatcgttaactgcgatgggcagatctgcgccattatttagcgatggtaatggcgtttttagtatgggccttttttatatttcaggcaatcaatgcgccagcaataatggctcagaagaaaaaataaccgctgagccaattcatttttccgcttatgctaccgggtgtatcagaccgctttcgtcaacccctgcgcttcgcagggatcgagatgcaccatcacattaagcaccggatgctgcgccagcacccgctcccgcgcgtgacgggcaatctgatgcccttcggctaccgacatctcgccagccacctcgagatggacatccaccagcaccagatcccccgccttacgggttttcagatcgtggaggcccgccacgcccggcgtggttcgcagcgtatcggcgatcgcctgctgcatctcttcatcaaccgcacggtccattaaatcatgcagcgcgctgacggcgaaacgatagcccatgcgcgcaatcagcagccccaccgccagcgcggcgagcgggtcgaaccaggcgaacccggccagattaccgataatccccagggccaccaccagggaggatgcggcgtcagagcgggcatgccaggcattggcgataagcagcgacgaattcagccgactggcggccgccagcatatagcgaaacagcccctccttgacggccagcgccaccagcgccatccacagcgccgcgctgtgcaccggcggaatagtttgcggttgcgcgagatggcccgccgcggaccatagcatgccacccccgacgagcagcagcatcgcgccgatgattagggaggcgccgttctcatagcgccagtggccatagtggtgatcgtggtcagacggtcgacggctctttttattcgccatcaataccacgccatcggcgaccagatcggaaaaagagtgcattccgtcggcaattaatccctgagagccggaaaatattcccacgactacctgtaaggcagaaaggaaaatattaaccaccacgctaacaagggtactctttcgcgcctgcaccgaacgctcatgatatttattatcattttcaaaattatgttgtgtcattatttctctccctttgtgagcgggaagaataaactgacaaactgagtttatgcttaacaatataaaagccattgccttgccgtttaacgatatcgcggcggtcggtaatgactatttactgtatgtgccgttggaacgctgcaaccttgcgcctatgaactatcttttgaagggtggccacaggtcgggccactttagcttagccaccacaggagtcagcgatgtcacataacaaaccatcccggctgcgtttcgccattaatctgggcaatgcggtcctggcccatctcggggagacaggaaagcccgcgggcatcaccgtcgagctcagccatcggctggcgacgcgctggggcgtcagcgccgaattcgttccctatcctgccgcgggtaaagtggtggctgacgccggtggcgagcactgggatattgcctttctggccatcgatccggcgcgggaagccaccctgcgctttacctcgccctatatcaccatccagggtaccgcgctggtcagcgttgattcgccctgccagagcgtggccgacatggatcgcccggcaaccaccattaacgtcggacaaaacgccgcatacgatctatggctaacccgccatctgcagcacgccagcctgcatcgccttccctcttcgcaggaggcaatcgacgccttcctcgccggtgaaggggatatggtcgccggcatccgccagccgctggaggcgacagcccgtcagcacgccggggtgcgggtactggcggataattttaccgagatccagcaggccatctgcgtcgcccgggcggacgtggaccgttttcacgcggtaaacgacgcgcttagcgagtggcgggcggatggcagtctgcaggcgctgattgccggtcacctgggccaagcgaactgaatcacgcctccgtcatccggcgcatggcgcaatgccaggcgccgttgcgtaccgaggcgcgcagtacgcgggccacgccatgcaccatcaggcgcgtcgtgcgccgctgcagcggcgtgagcgacaatcccagcatctcctgcgcccattccggcaggaggtcaattcctgcgttcatcatcacccggccgaccggctggctcatccgccccggcagacgggtggagagcagcacctcggctacctcccgggtacgttcgtcgcagcgcagtcgcgggcgcatcgcctcgagatagtccgccacctcctgcggtgtctgagggatatcccgagcccccagccgccgggcgatttccgccgactcacgaaaatagtcctcctggcgctcgggactgaccaccgtccgcttgtagcgcaggtgggaggccataaagcaactgcactcggcgacgtgcacccaggttaacagcgccgggtcgctcgcctgatacggggttccgtccttatccaccccggcgatccgctgatggatcccctgtactttggcgattagccgttcggcgtcgggggtagtggcaaaagtggtggcagaaataaactggctggtgcggcgcaggcggcccaaaatatcctcgcgaaaacgagagtgatcccagacgccggccagcgccagaggatgcagcatctgcagcaacagcgcgctaatgccgccgcagagcatcgaggtaaaatcgccgtgcacctgccagatggccgactggggaccaaacagccccggctctcctttgggtcgttcaaagtcgatctcttttagcgccatgccggtcaggccgagcacctgcgcctcgatcatccggcgaatgccgatcatgatggtatcccttacgtgcaactaaaggacaaaagataccactgttggacagcattgggagagatattgcggaaagagtgcccgcagcacgcgggcacgacggcttacggattcagctggtaatcgagggtaatgttggccttcagcacctgcgataccgggcagcctgctttcgctttctggatgatctcatcgaacgccgccggagacacgtccggcaggacgatctggctttgcagcgcgatatcggtaatcgcaaagccgccgtcggttttattgagggtgaccactgcggtagtgtcaatggacgttgcggtatatccctcttcgctgagcatcagcgacagggccatcgaaaagcaggcggcatgtgcagcgccgatcagctcctcagggttggtgcccttcaccccctcaaaacgggtgttaaatccgtagggctgctggctcagcgccccgctttctgtcgacacggtgcctttgccatgcttcaggtcgccttcccagtgcgctagccctttcttatgaatcgccatttgattcctcctgtagtgatgtcgaacaaaaagtatagtgcgtgatgccgaagctgcgtcttttcgcagcctctggcccccacgttcccctggttttcgtgtcgttggtgacgctatcggccatcctgcggatgccagggatcggatttgtcatccttgctgtcgtcccgtttacgcggaacttcgccctgctccccgggcgcctcacgggcaggttgcttaccgcgctcttcgtcttgcgagtgagaaaaggtgctcatatcgacgtgctccgcttacttaggcgactgcttgagcagacgatcgattcgcacgaccggcggcgtcattttgcgatccagactgccgttgatattgaccagatcgtctggctctacgtgttgttcgttaaacgcggcgaccgggataataacggtgatggtgccgcttttatcacgaaactgataacggtcatctccctgccgcttgagcagattgccgcgcagcgaaacggtcgcgccatcgtgcatggttttcgcctgctcaacggtcatgatccggccatcctcgacgccgcgatagccgtcatcgagtttgtgcggcggcggcggcgcggcatcctggctaaaccctcccttatcgtccgcctgcgcgacacctacggcaaacagacatgccatggccaatgctagttttttcatcatgcctccgttttttgctgacgatgagaataaagcctggctgaggctggccatttttacaaagtcaattgttctgatatcgtctaatataagaatgtccttatcgttacgctcctggcgaaacgaaacgcggggaaaatattaatgattaagaatcaacagccttgtcctatcgtcgatgagaatgaacgctccttacgctttgaatatcgcttccgccgctatgggataattgttttgagtctcatcattcttaccgcgttaagcggcctgtggtcctccggttatttcagtgaagcacacagggaaaccggcggaggcgaattaagcgtcgattatcagcgctatgccaggctgatgagtgaaaccgagcttaatattcagattaaaccggatacggccagtgacaccattatcagcttcgccgccccgttattaacccgctaccagatcggtgatatccgtccgcagccggataaaatgtatagcgccgaggggaaattacatctcgtctatcagcggtcgaacccctcttcaccgatatctgtgtggttagccgttaccccaaaaacggccggtaatatctctctgcaggcggtagttaacgatcgctattctgtaacctggcagcagtttgtctatccgtaggagtcgctatggaaatggtccttagagccgcagcaatctatctgatcctgttgattatttttaagattgccggcagaagaaccctgatgcaattaaccaactttgacctgatactgttgctgattatcagcgaagccacccagcaggcaatgctcagcacagactattcggttaccgggtcgatgctgactatcgtcaccctggttagtattgatattttgttcggctatattaagaaaaaatttgctcaggcagaaaattttctcgatggtacgccggttatcgtggtggaaaatggtgctgtcatcgacgagaagattaagctcgtcaatatctctgtcgatgatatcctgctggcggccaggcagcaccatggcatttatgaattgaaagcgatcaaattcgctattctcgagcgtaacggccagatatccattattcctgagcaggaatagtatcggcttcgctatttatcacgctccggttgtttatcacctgattccggagcgcgagtggcgtcatcctcttctttttcatcgttaacaacgttcaacattaacatttttcctcctcgctggttgtcagggatcctacaaattatagaacgccttcgccgaagtatgtaggatctgccgaaactaaccaggagatgccgcctgattcacattgcgcttattccaggatatttcccacctcgtcattgccattggtgagaaataattaaccgatccgtacagtcaatattgtgaaagccaaaacataatgaggtcactatgtctgtgatggttattaccggtggaaccgcgggagcgggcaaagctaccgcgctgcgtttcgcccgcgctggatatcacgtggcgctgatcgcccgagacgaaacgggtttgcaggagacgcgacaggcctgtgaacggtttggcattaaaacgctggctattagcgccgatgtcgtcgatgccggggcgctgcagcgcgccgccgccgaggtggaaaccaccctcggggcaatcgacgtctggatcaacaacgccatgaccaccgtgctggcgccctttcgtcagatgagcgaggaggagtttcgccgggtgacggaggtgacctatctcgggtacgtgaacggcacccgcgcggcgctggaggtcatgatcccccgggatcggggggtgattattcaggccggctcggcgctggcctggcgttcaatcccactgcagtcggcttactgcggagcgaaagcggcgatccgcggctttaccgatgccgtgcgaaccgaactgatgcatgagaaaagccacatccagttgaccatggtgcaactgccggggatgaacaccgcccagtttggctgggcgcgaaacaaaatggatcaggccatgcagccggtgcccccggtctatcagccggaagtcgccgccgaggctatttacagcgtcatccagcgcccggtcaacgagctgtgggtcggaaaaagcaccatccagtcgatcctcggccaggtcttcttccctcgcctgctcgatcggctgatggtgaaaaaagcgtgggagggacagtttaccggtcagccaaagtcgtcagaccaacaggacgacctgttcacgccggtgcgcggcaatcatccgggccacggcccctttaacgatggcgcacggcgtaaagcagtcaccatcagcgccgatctcccgggtaaagtcgccgccggcgtcggggtagcggtggcgacgatggcgctgcgggcgttgttccgtcgttccggaaaacggcgctaactcaggctgcggctgaaccaacggtaaccatacccggagagtgccagccgcgcatctttcccgccgtgcagcccatcctgatagagcttatcttccagaattgggctccagtagccctcggccagcggcgggagcaggacctctaccgcctgctggctgcagttggccagcatcagtacctcccgcgattcgctgcgatagagcaagcccagcaccgcgtcgggctttagggtaaggagagtaaaagggagtgatcccggttcagtatattccgtgcgcgccaataccatattgcgtacccgatgcagcagcgacctgggatggcgcagcgccgtttcgacattgatccgttggtagcggaaccgcccgctggccaccggttttaccggcaaatcatcccgcgccgcccgggaaaagccggcgttggccgcggccgaccactgcatcggcgttctgaccgcgtagcgctccggtaaggagagatcatcacccatgccaatctcgtcgccatagcgcatcaccggcacgccgggcagcgccagcaggatagcatgggctaacgctatgcgtcgggtatcgccgtccagcatcggcgccagtcttcggcgtacgccgcgctggtaaacggacatcgatttatcaggggcaaaggtgcggataacctggcgcttgttgcgctcgccaatcccctcaagatccagttcatcatggttgcgcagccagttgacgaagcagcacccgtccggcggggtcaccatcgcctgcagggccttcaccaccggcgcggcgcgctgctgcgccaggctgaggtagaggtatttgttaagccagaaattaagcaccatctgcagccgatcgccctggccgaaataatgacggtaatcttctaccgcgacgtccacttcacccaggagtatcgcatcgggattgaggcgctgtacaacctgccggagatgggtcagcagcgggtagccgcgcgtctcgtcgccctttccggcctgcttgaccagatgtgacgcggcatcgagacgaaagccagacaccccagcctgcagccagaaggtgataatgttttcgatttcagcgatcaccggcggatgggcgagattcaggtcgggctcgtggtgataaaacatgtggcgataatattgcccagcctgttcgtcccagcgccagacgctctcctcaacgccgggaaacatgggaggatcgtcgttttccggcggccgatcggcccacagataatacggccgccacggcgaccggggatcgcgtcgcgccgcctggaaccacgggtgctgcgcggaggtgtgctggatcaccagctcaacgatcacccgcagtcccagctcgcgggcgcgggcaatcagctcaatcacgtcagcgatagtgccgaaccgcggatcgggctgcagatgatcgctgatatcatagccatcatcctgcagaggagtgagatagaacggagtcagccagagcaccgtcgctccgaggctgcgaatgtagtgtagcttttggcgaatgcccgcgagatcgccaaaaccatcgccattggcatcataaaagagcgaactgtcaacctgatagatgaccgctctgtgaaaccactcttcccgttgcatcactctcacctcgcgttctgcccgtccctgtcagccgcctcagcgcgatccggaccccgccctggccttcgcgcgcggtttgtcgacaggcgatacgggattgcgttccgctggtagcatcctgttcgctaccgcgtccaccagcgcctgctgcctggcggttaataccagcggaacctgttcctcggcggcgaggagcgcgatggtttgccgtttgaccatagcgttctccggcggcttaatgcccggcctcaacgccaggcatatcggtatccataagatattgcccggtcagcgctggcagataatggagcagccaatcagccattcctctctcttcagccaggataccctccagtgtatgcatcgcgctgtggtcgcctactcttttcgccgccgttaataaagcggtatagcaggcgacctcaaaatgggcaaaaacgtaggcagtgataatcactttaataacctcatcaccgggcagcatgatgccaatggtctgtcctaacgccgccacccggctcatcgcatccttcagcgcagagcgggaaatatggttgcgggcgatgatatcctgcagggcggacaattgccgtcgggtttcatagagatgttgttcaaggcgggtgcgtaactgcggttcattatcgaggcgtctgatggtggccaccagcagcgactcagcctgtttttccatggcatgcgcatcgcgaagccagttgtgataattttcgatatccgtcatatacacctctgatcattaaccttttattttgacgtggaatcttcactctcttccgccgcctggtcagctcgcgctgcgctatatccggataaatggccaacaatattggcataaatactgatgagaatgacccacagtacgctgtctttccaccagatcaacgagggtatcgccagacccacccacataacggcggcgacaagatgacagcgcttaataaacactggcgtcaacttcattttattaccttaggaccgaacaatattgagcgaccattttatcgacgctctgaccgcagcgtcaggcgctaaaccttacgctgaaaatgtctttcttttgcctaagcataaaaaagaaagtagcgttgcgtattgtcccgttccgttattttctgtctttaccgtccggctaatttattgccgctgcggccgtcttttattgctagtgatgcggcgacttcctcctcaccttttagtttccccacatcgcggataatgaatgtcgttatagataaataaaccctgaatatgcagaaacctgcggaccatctggcccacaggttttgtctcaacgccgatttgtcggcgtcacagctcatcagtcgctagctgtcaccggatttacggccgccgccatgactgttcttaccacccttcttaccggcttcggatgcacgctcaggatcatttttaaagttcccgccgctgtgctgtccgcctttacgcccggcttcggatgctttctcacgatcttctgcaaaattacctgaaccgcctctatgctctgccataattttcacctttggtttgatcaatatcggttggtaaatggaaaatgaccctgttacaaatcatcgccctcgatatctaacactagaggaatgcctgcaggagtcaaattaatttcagatacccatccgcgcactgacaaaataaagctttactaacgaagcggtaagataaaatatacctcacacaactcctttatttgacgtaggttatgttcaccggcgggtaaaacagaatcgtccaacggccgtttgtaaaaaaatgcaaacgatttaatgaataaatatttctttatcccgcggaacacaaccccaggaatattacccctaaagaggtatcaacttataggccatggtttgcgaatgaacatcttcatcgtttattcagggagcaccttcatcctaactcgagaaaaagatcatgcgcgttacgaaaatagccctcgatccttgattaaggatggaataatcctaatttaacgtcagcaataataacgcaacgctatcccccgaaatacgccaaggatcagtcggttaaggcataccgttacgcctacggttggccattgactgcgatgttgcgagtcattcagtggctgtcgccaggagaagctgacctattcttagagctggcccgttctgtctgaaggagatgactatgcaagatgaaaaaccgccaatgaagaagttacccacctccatgttgccagaagagacggctccacgtccggagttcccggagcaagaacaaaccccgccgggtctggatgcggaaatggagccatccccggaccacggtgaaaccagctacaccggctccgggcgactggccggtaagaaagcgttaattaccggcggcgactccggtattggccgtgcggtggcgatcgcctttgcccgcgaaggcgccgacgtcgcgataaactatctgcccgaagagcaaaaggatgcggatgaagttatcgccctgatcaaagccgaagggcgcaccgcggtggccctcccgggtgatattcgctccgaatccttctgccagtcgctggtggccgacgcggtggaacagctgggaggtctgagcatcctggttaataacgccgggcgtcagcaatactgtgaaacccttgaggaactcactaccgaagacttcgacgctacctttaaaaccaacgtctacgcgccgttctggatcacccgcgccgcactgcctcacctccaggccggaagcgcgattatcaataccacctcggtgcaggcgtataaacccagcccgatcctgctcgattatgcgcagaccaaagcctgtctcgcgatcttcactaaatcgctggctaaacaggtggcgaaacgaggcattcgcgtgaacgccgtcgcgcctggcccttactggacggtgctgcaatccagcggcggccagccggacgagaaggtgaaacagtttggcaaagacacgccgatggggcgcccgggacaaccggtagagatcgccccgctgtatgtcaccctggcatccgatgcctgctcatatacctccggacaggtgtggtgttctgacggcggggatggtgtggtctaagcctcccggcataccgacgcgcgccagcgcgcgccggtattttcccggccaacccttgcggctatatactggcccctcgcctcccggttgcggcaattttttctttcctccactccgctactctggccgcatgctatgatgtccgcccgccgctgtgcgctaaccctggccccgacgccacccctgaggacgacagatgagtaatgacatccccctgaaattttatgacatcgtggacgaatacgagaccgaagcggctgcgccggtaaaggatgaagaacgcgatgcgctggcgcgctatttccaactgctgattgcgcggttaactaataacgaagagattgacgaagaggcgcagcgagaaatggcccgcgaggcggccattaacgaaaaccgcattgacgatatcgctaatttccttaatcagtggggcaacgaataaagctcaacgtcagcctaccggcggaattgccttccgccggtgctgtcggggcgcgaagcgccaagactcagccgtggcctgtctcctctcccagacgcctctgcagcgcatcaagaaatagcggtaatccgtcaggttggtagtcgcgggaaagatagatgccgtaaacgctcaacgccttcggcgtccactccggaagcaccacctccagcgtgccgctggcaatcgcgccccgggcctccagttcgggaagcatcgcaatgccgcacccggcaaccgccgcctccagcagcaatgaagatatccctgcgctcagattaccgttcaccgccaccgacgcttcccgcccctgcgcatcgctgaactgccagtgctggctggcgaaatggctgtatagcaggcagttatgtcgttgcagatcgtcgggcgtcgtcaatgggccatgctggcgcatccagcccggcgcggcgcagagcagcgaacggcacactccgaggcgacgagcgatggcccccgcctccgggttgtcggtaatgcgaatggccacgtcgatacgctcgccgatcaggctgaccggatggttattgatatccagctccaggcgcagtagtggatagcgggcgagaaagtccggcagcagcggagagatcagctgcatggcggtaaagtgcgcgcaggcgacgcgcagtgtgccgctgggatcggcccgctgacgctcgccggcgatttcatcggcgatccgcgtcaaaccgcgggtcttgagcaataccttctccccggccggggtcagcgtcagccgccgggttgagcgatggatcagccgggcgccggcccagctctccatttgttccagatagcggctcaccatcgggcgcgacatccccagcgcccgcgccgcggcgctaagacttcccagctcgcagatgcgcagatacacctgcgcagcaatcaccctgtccatcactccccctgatctgcacgttttatgaaactcagcatctcttgtttcaggaattctatcaaatagcgaaatccgtacaatggaacgcattcacctgttactgagaataaatcatgaaattatctgcccttgctgttgctaccgccctgttcagcggcgcggtcttcgcggcgcctctgacgctgcaaacttacaacccgcaggaaaaaggactttttgccgtcaactcgaccctcgtttccggtccgcatgaagcggtacttttcgacgcgcagttcagcgtcaaagatggggaaaagctggtggagatgatcaagaaaaacggcaaaccgctatcgcggattgtgatcacctctggcgatccggatttctattttggtcttgagccgctggtaaaagccttcccgcaggcggaggtggtcgccacgccggaggtcgtcaaacatattgcagccaccaaagcggccaaactggcgtactggggcccgcaaatgaaagacggcgcgccgacgcaggtgtatgtcccgcaggcgctggaggccaacagctttaccatcgatggcgagaaagtgaccatcatgcagccgcatgactacgcggcgttcgtctggatccgggcgaacaaaacgatcctcggcggcaccggcgtggcgtggggtatgcatctctggaccgccgacacccagacgccggccagtcgtcagcaatggcgtaatacgctggaccagatgatcgccctgcacccgcagcgggtgatcccgggccattatctcggcaccccgccggagggagacagcgcagtgcgctttacaaaaacttatctccagcagttcgagcaggcgctgaagacgcattcggattcggccggggtgatcaaggcgatggaggcacagtggccgggcctggcggagaccagctcgctggagttaagcgccaaagttaataccggtgagatgaagtggtgacccctgcggcgcgcaaggaggactgttcttaatctggctccccagggttgctattaccgagaaaatagaccaccctacctgtggccgcacaaaaaacgcgcggccgactttgggttacatttcatccggtcattaccgggtttgcccttgaaaccagaacaggataaaggagtcagaatgaaatcgaaccatcaggcacgtcatcttctcggtctgaactataagctttcccggcagaaaaaagtggtgctggaaggcgatgaagaaaccaccatcaaccacatccatgctaccggccgcaaacgccgcggtggttaattttcagcctgagtgatgataaacaacaccgtcctgttgccaggatggtgtttttttatggcaattgactgcttgtttacccgcttgaagaccttctgctctatactctgcccgctgctttccacccgcccttcgcttatcgccgcgccgggactgtggtcatgatcaaggagttagtgcgatgcaatttacccataagaaaaaccgttccctgtacatcccctacgcgggtcccgttctgcttgaattccccctgctcaacaagggaagcgccttcagtatggaagagcgcagcaatttcaacctgctcggcctgctgccggaagtggttgaaactatcgaagagcaagcggaacgcgcctggatccagtatcagggattcaaaactgaaatcgacaaacatatttatctgcgtaacatccaggacaccaacgaaaccctgttttatcgcctgatcggcaaccaccttgaagagatgatgccggttatctataccccgacggtaggcgcggcctgcgaacggttctccgagatctatcgtcgcgcccgcggcgtctttatctcctaccagaatcgccataaccttgacgacatcctgcagaacgtcccgaaccacaacgtgaaagtgattgtggtcaccgatggcgagcgcattctcggcctcggcgaccagggaatcggcggaatggggatcccgatcggtaaactgtcgctgtacaccacctgcggcggcatcagcccggcttacaccctgcctatcgtgctggacgtcggaacaaacaaccagcagctgctcgacgatccgctgtatatgggctggcgccatccacgcattaccgacgacgagtactatcagttcgttgacgacgtgatccaggcgattaaggcccgctggccggacgtgctgctgcagtttgaagattttgcgcaaaagaacgccatgccgctgctcaaccgctaccgcaatgaaatctgctcgtttaacgacgatattcagggcaccgcggcggtgaccgtcgggacgctgatcgccgccagccgcggcgccggtagccagctgagcgagcaaaaaatcgtctttctcggcgcgggttcggccggctgcggtatcgctgaacagattatcgcccagatcgtccgcgaaggactcagtgaagaagaggcccgccagcgcgtgtttatggttgaccgcttcggcctgttaaccgacggcatgcctaatctgctaccgttccagaacaagctggtgcaaaagcgtgagcagctgcagagctgggataccaccagcgaggcgctgtccctgctggacgtagtgcgcaacgtgaagccgaacatcctgatcggcgtctcgggtcagccgggactgttcacggaagagattatccgcgagatgcacaagcactgcccgcggccgatcgtgatgccgctctccaacccaacctcacgggtggaagcgacgccgcagaatatcctgagctggaccgacggcgaggcgctggtcgccaccggcagtccattctccccggttaccgtgaaaggcaagcagtatcccatcgcccagtgcaataactcctatatcttcccgggtattggactgggggtgatcgcctccggcgcgtcgcgggtcaccgacgagatgctgatggctgccagcgaaaccctggcgcagcactcgccgctggtcaacaacggcgaaggtccggtgctgccggagctgaaggatatccagaccgtctcacgggcaattgccttcgcggtcggtaaggtggcccaggagcaaggcgtggcggtgaaaacctccgctgaagcgctgctgcaggccattagcgataatttctggctgccggaatatcgcaattatcgccgcacctcgatttaatcacgctcaccgggtcgacatatcggcccggtttttaataacgtcagaataatatctcccgccacagaaacgtttttttcgcccatattcattcatcgtaaaaatataaaacggatagcatttgccgcgcgccctccgctgtgcaaaatagttgtttctcaccccctcacaacggaatgtgaaatgctaaaattaacccctggcgcgaataaagcgaatgcgattctgatccgtattgtcttgtttcttatcggcggtatcgccatcatcaccggaatgtgcctcttcagcggtgatatgtggatgctcaccccgcgggcggaacagtatcagcccgccaccggcgatctggtggatgtcgtcatctatgaaccgagtaaatttttcttcgccctgctctacgtgtttattattaccctggtctggctgctggcggtacgtaaaatcccctggcggccgatacagcatcctatattagcgctgataatactgattgccgccgggatatttattttcctccacccggaggtcaccccgggtcgggatgccagtattcagtacggtaaacacaatacctattatgcgtccatattctggatgaaaacccggtcaggtagtcattccgctaagcaatcaaaatatgaaacctttgttgaagcgaaagatccccgctggcttatcgacagaaataatcttcgccgcgcctggcgctgtgaagtgcagcggcatacccagttttacaccctgtcattcaatgagggctggttcccgaacggcgatccgcaggtccttgccaaccagtgtagtcagattgccgatctggatacggtctctgaagacgagctgcttgtcactaaaaccatcaggagccgtaaatgagccagcaaaaaatggttttgcagccgatattacgcctctggctggggctgtttagcggactgttgctggtgagcgccatcagcgcctttcacggtgagtactggtatttcggcgataagcaggcgttttacgcggcgaaagccggcgaggtctctgtgcatgaactctatacgccggcgaaaatcctctttgcttttatcgtcagcacgatcccgccgctgctgtggctgctgctggttaaccgtcgggcgccgcggctgctgacccacactctcccatcggtgttactcctgctggcgggtttgctgtttttcttcctgagacccgacgtgattcccggcggggaaacccctgtctatcgctacggcgagcgggagcgctactaccagacgatacgctggcagaaaccggagcctggcgcgtggcggggtacccgctctgagtacaacgtgtatatcgaatatcgtgatcccaggggatatcgcaaagtcgacaatattaaaaacgcctatacctgtgaaacccaccgggagtctcgcttttttaccttaacgaccgaagaggattggtatccggattcgtatccgaatattctcgaggctccctgccaggcgataaaggatccccaggcgatgacggaatatacccgcgaccacgcccgctggtttcccattacgttttagcaaacacactagccttttgcgccaacaatatctcgccggtaatggcactgaacacgaaaactggtgggtatcggcccctgccagttttgtcactggcgcgctttccctttccccactacactgccatcacccatccacttactgaataaaaaaggaggccccccatgctgtattgtgaaatgtttattgtttcacatgccttaggcaattgcgccagctcaagcgttatcggtatcgtgctgcgataactatggcttgagcgaagacccttcacgcaatcccttctctccggcttaccgggttatcgtcagcgagttttgacgaggcatttgcatgcctgtaactcttgagtaagttgactatgagtacattactaactgcccatgcgctccacgtggagacggcttttgggccgctgtttaactccctctccttcaccctgaagaaaggcgaccggatcggtctcatcggccataacggttgcggcaaaagcaccctgctgcaggtgctggacggcaccctcgcgcccacctcgggcagcgtctcgctcgccggtcagtgtctgatggcccgcgttgaacagcatctgccggaggcgctgcatacgcagtcgctgctgcaggcggtgctggccccattacccgccgacgcgcgggaagcacagcgctggctggccgagcgcctgctggcgcagatgggctttaccccggcggtgatggagcagcagaccgccaccctgagcggcggccagcacacgcgtctgctgctggcccgggcgctgatccgccagcctgatctgctcttgttggatgagccgggcaaccatctcgatctgcccaccctgctgtggctggaaagcttcctgcaaacctggcaggggagcttcgtactggtgtcacacgacaacaccttactggatgctgtaactaatgcgagttggatcctccgtgaccagacgctacattgcttcgccttgccctgcagcgctgcccgtcaggcactgcaggagcaggatgaaagcgccgcgttacgtcataaggcggagcaaaaagagatcgaccgggtcagcgccagcgcccggcggctggccacctggggtcgggtctatgacaatgaagatctcgcccgcaaagccaaacagatggagaagcaggtcgcccgccttaaagacgagcagaccgagctcagcgtcggcccgccgtggcgcctggtgttacagggggacgccctgccggccgaccgccttttggagatggacacccttcccgtctcgcccgcgccgggtcagccatccctcttcaccaccggcgtggcgcgcctgcgcagcggcgatcgcgtggccatcatgggacgtaatggcggcggcaaatcgtccctgctgcgcctgctgtggcagcagatgaacaacgcatcgcctctcccggggctgcgcctgcatccccggttgcaccccggctactatgaccagacgctggcgcagttgccggacgaggccagcctgctcgaggccctgacgccgtttgccccgtcggcggacacccgtaaacgggcgctgatcgccgccgggtttggctgggcgagacatagccagaagatcagcaccctcagcggcggcgagcgatcgcggctgctgttcgttggcctgtcgctggcgcgctacagtctgctgctgctggatgaacccaccaaccatcttgatatggagggtaaagcggtgctggcgcagacgctgcgcgattaccccggtggcgtgctgctggtcagtcatgaccgccagctgattagcgaaagctgtaaccgcttctggctgattgacagtgccgggctaacggagtggcacagcctggaggtggtctatgcccgtctgcaggccgtggcgcccgccccggacagtcggctcgctttgcagagtacacccgccggggctgacgatgatgaggaggcgctgctggcgcggctgattgacctggagcagtggctggctgacgacatggcccgcaagccaaaacatcaaaagccgtcgctgcaggcacagtggcaagaggagattgcccgcctgcttaaccaactgacgtaatctccatgtccccccaccggctaaggcgcaacacccttagccgatgtttccggaccgggtaaactgctgctcggtcattacctttccccactgctccccctgccattcgcggattaacgtgaagccaaaggattcatacagtttgcgggccgcgtccaaccctttaaaggtccacagctgcaccgcgctaaactggcgactatcgcagaaagccatcgcctcgctgaggagccgcctgccaatgccggttccccggcagctgtcatcgagaatgaaccagcgcaaatgcgcctcctgctggccgaggtcctcgccatcgatagccagcgagccgacgattttcccttcgcggatcgccagccagatctggttggccggggaggagagccgggtggcaaattccgctacgccgctggcgaccttgccttcaaaaaaagcgccaaagtcatgatgacgggcgtaatactccccgtgcatctgggctatccggccgatcatccccggctggtagccggtcatcagcgaaatttgcggagccgtatccgcaagcgcgctatcccgacactgcgccagcgcccgggcataggccgccagtccagtggcgacagtgtgctgctgcgtctcatccagatggtctaacgcctccaccacctgacgggtaccccaggcgttaattttcgccaccgtatcgtgcccctttgccgtcagggcgagtgatttcgcgcgcgcatcctccgcgcaaggacgctcctccagctcaccagccgccagcagacgagagaccacccggctgacgcttgatttttccagtcccagcaacgtgaccagctgcgcggccgtcatctcccccctcatcgatacctcaagcagggtgtgcaccgccgaaggtgaataatgggtggcggccagcgtggtgctcataaagcccagctcgcgcaccattaaccgcgaggcggtacgaatctgttggattaagggggtatcaggcatggcggcgggtccagaaaatgaaatggttgtacaatacaacctcgccttcatcctgcgtcaatatgcaatatggtgggataagcgttgtcgtgtgacgtgtgacgtgtgattttgccgccacagggatcgtgaaagcgaatgccgcgggcgccggacagcgcccgcgatgaatattattgcgggttcttcgccttccaggcctcccaggccgatttgatctcctgcttcgcggccgcggcgtcattaaagccggccagctcgacctttttacgcccctccggcagttctttatagacccggaagaaggcctccagccgctgctgttctattttcggcagatcggagatggtcttgatgtcgtcgtaggtcgggtcaattttactggccggtacggcgatgattttgtcgtctttctcaccgccgtctatcatcttcagcacaccaattgcccgcagcttaatcagcgtgcccggggccatcggcgcgcgggtataatacaccacgtccagcgggtcgccatccccggccagcgactgggtcagcgagccgtagttcgccgggtaggccaccggcatcgactgaaagcggtcggcgacgataaaccccgttttagcatcggtttcgtacttaacgatcccgcccgtcgggatctcagtgacggcgtaaaattcttccgggttgttttccggctggggaaattccagcacattgtgggcctgggcggcggcggacaaaagcagaccggcggtgaggatggtttttaccagatgcattgttgtatcactctgttgttataagaaattgatgcgcaaaacaatagattcgagtgatgacaaaaacatgaccattcagcgtcaatattattacctaccaaatatagcgatattgtctgaattttgtgctatccctgtagcaaaaagccacattctgtactaagcgccttgtattttaccgctcagcgtctaatccttattgggtactattgcattaattaagttaatcaattcccccacaaggagacaggcatgaaggcagctgttgttacccacgaccatcaggttaacgtcacggaaaaaacgctgcgcccgctggaatacggcgaagcgctgttgaaaatggaatgctgcggcgtgtgtcatactgacctgcacgtgaaaaacggcgattttggcgataaaaccggcgtcattctcggccatgaagggatcggggtggtacaaaaagtcggcccgggcgtcacctccctgaagccgggcgaccgcgccagcgtggcgtggttcttcgaaggctgcggccactgcgattactgtaacagcggcaacgagacgctctgccgctcggtgaaaaacgccggctataccgtcgatggcggcatggcggaagagtgcatcgtcaccgccaactacgcggtaaaagttccggacggcctcgactccgccgccgccagcagcatcacctgcgcgggcgtcaccacctacaaagcggtcaaggtctcccacatcaaaccgggccagtggatcgccatctacggcctcggcgggttgggtaacctcgcgctgcagtatgcgaagaatgtctttaacgccaaagtgatcgctatcgacgtcaacgacggacagctggagctggcggcctcgatgggcgccgacctgaccatcaactcccgcaatgaagatgcggcgaaagtgattcaggaaaaaaccggcggcgcccacgctgcggtagtaaccgcggtggctaaagcggcctttaactcggcggtggatgccgttcgcgccggtggccgcgtggtcgcggtgggcctgccgccggaggcgatgagcctcgatattccgcgtctggtgctggacggcatcgaggtggtcggttcgctggtcggcacccgtcaggatctggtggaagccttccagtttgccgccgaaggcaaagtggtgccgaaagtcaccctgcgtccgctggaagatatcaacgctatcttcaaagagatggagcaaggtcagatccgcggccgtatggttatcgatctgcgtagctaatcacccgcgcctctcccgtccgggagaggcgatccccctggcacgtcctctcgcttcccaacccgggaagtaaatgcaatttccgcaaatgcttagcgcaattccttggttcctttgtttttagccgcgcccgatgatggcaacacaatagataacaaaggaattcaccatgcatcgtcattttcgcctgcccgcgctggccgcgctgtttctcaccggcgccttttccgtctgggccgccgacacgccggttaaaggcggcaccttaatttatctggagcagcaaccgcacaccaatctctatccgcccgccggcggcttttacccgaatggcgggattctcaatcagataaccgacaagctcacctggcagaacccgaaaacgctggagattgagccgtggatcgccgagagctggaccagcaatgccgataaaaccgagtacactttccacctgcgcaaaggggtcactttctcagatggcacaccgctggacgccgccgccgtcgccaaaaacttcgatacctatggtctgggagataaagcccatcgtctgcccgtctcggaggtcatcaataactaccagcgcagcgaagtgatcgacccgctgacggtaaaattctacttcaacaagccgtcgccgggcttcctgcagggaaccgccaccatcggctccggtctggtatctctcagcaccctgcagcgtaattttgaagagctgggcgatgcccgacatattatcggctccggccccttcgtcgtgcaggatgaaaaaccaggccgcgagctgacgctggtggcgcgcaaggattaccagtgggggccgaaaaacattgcccagcaggggcccgctaacctcgacggcatcacctatattgtgacgccggaagacagcgtgcgtatcggcgcgctgctggcaggtcaggcgggctttattcgccaggtgcaggcctacgatgaaaagcaggctaccgatcagggatttaagatctacgctgcccctacccgcggggtcaacgacagcctgagcttccgcccggataacccactggtcgccgacctgcgggtgcgtcaggccctgctccatgccaccaacgccaggcaggtggtggagacgctgttctccgctaactacccgcaagccacctccgtgctggccagctctgccgccggctatgtcaatctcagcgataaactcaccttcgaccaggccaaagcccggcagttgctggatgacgccggctggaagcccgccgccgacggtattcgcagcaaagacggtcagcggctggcgctgaccgtttatgagtcgctgccgcagccgcaaaataaggaagtgctgcagctgatcgcccagcagtggcgccaggtgggtgtggcgttgacggtcaaagccggggatgccggtagccgtacgctggataacctcgacccgcagaaaaccccgctcaccgtctcagaagtgggccgcgccgacccggatgtggtgaaaagtatgttcttccccaacaaccgcgatgcgctgctgcagaaaggcggctccagcgataaagtgcagcgcttccgcgatgataagctcaatgacctgctgaccggcatctccgcggcggttgaaccgcagcagcgcttgcagttaaccggtgacgcccagcgctatctgatcgataacgcctatgtgatccctattttcgaagagccgcaggtgttcgccggcgcgccgtgggtcaaaggcgtcagcttcgaggccgtcggtcgtccgtcgttctacggcgcgtggctggacaagcactaagaggccggttatgagcgcttatcttctgcgacgattcggccaggggctgctggtcctgtgggcggcctttaccctcacctttttcctgctgcaggtcctgccgggggatgcggtgctgatcaagtttcagaacccggacctcggcctgagcccggcgcaaattgcggagatgcggctggcctacggcgccgatagcccgctgtggcgccagtacctgcacacgctgctggcgatgctgcacggcgacttcggctattccctacaggcgggtctggcggtcagcagtctgattgccagcaacctgccggataccttaagcctcgcgctgccggccttcctgctggcggtggcgctggcgttcgccctcgctttcgcctcgcggctgccggggctgcgctggctgagcaattttctgcagtcgctaccggtgctgtttatctctctacctaccttttggttgggtatcgccctgatccagctcttctcgtttcagttgcgctggatcccggtgatcaaccccggcccactggaaggactgattttaccggttatcgccgtcgcactgcccatttccgccccactggcgcagatcctgatgcgcagcatggatcaggtggcggttcagcccttcgtcgcggtcgcccgcgccaagggcatgagcgaaacgggcgtcctctggcgccatgtgatggggaatgccctgctgccggcgctgaatattgccgggctgctgctcggcgaactgattgccggggcgctgatcaccgagaccgtcttcggccgcagcggcctcggccagctgacccagcaggcggtcaataaccaggatatcgccgtactacaggcggtggtgatgatctccgccctcggtttcgtcctgatcaacctgctggtcgacctggtcatgccgcgactggatccccgactccatttacagaccggaggtgcgaaatgagcctggtcgactataccatcgcggttcgccgccgcccggagtggcgtagagtgcgcctgcagcctggcctgtggctggcgtgggcggtgatgatcgccgccctgttaatggccattgccccacagtggtttacctccgctaacccgctggaggggatccccggcgctcagcgcctggcgccgcaggcgcactactggctgggtaccgaccagctggggcgcgacctgtggacgcgggtggtttacggcgcggtgcattccctgtcggcggcgctgatcgccgtcgccatcggcctggtggtgggtaccacccttggcaccctcgccggggcgctggccggacgcgtggaatccaccatcatgcgcctggtcgatgtcctgctggccatcccctccctgctgctgcagctcacggtgattattctgctgggtttcggcacggtgaatgcggcggtggcggttggcgtcgcggctatcgccagcttcgcgcgcctggcgcgagcagaagtggtgcgcgtgcgccacagcgattacgtcgaggcggcccggggcagcggcggcacctttttcgccgtcttctggcgccatattctgcccaactcgctcactgcggtgcttgctttcgcgacgctgcagttcggacaggcgatgttggccctggccacgctcagtttcctcggctacggcaccccgccgccggtcccggagtggggactactgatcgccgaaggtcgcaattacctgtcaaccgcctggtggctgaccaccttccccggcctcgccgtggtcgccgtggtccttgccgccaatcgtcttagccgccagtggagtggagcacgcccatgaccgttttgtccgttgaagatctacgcatcagctaccgctcgcggggcgaatggcgcgaggtggtgcacaacatcagcttttccatccagcgcggcgaaatgctggccttcgtcggagaatccggctcggggaaaaccaccaccgcgcaggccattatcggcctgctggcggataatgcccgccgggatgccgggcggattgtcctcaatggcgaagtgattagcgactggtcggataaacgcctgaaccgcctgcgcggagtgagcatcagcctggtcccgcaggatcccggtaattcgctcaacccggtaaaaaccattggtcagcaggtggaagagatcctgcggctgcatcagtccctctccgccgctgagcgccgacagcaggttcttaacctgctcgctaaagtcggtctcagccacccggaacagcgttttgaccagtatccgcatcagctgtctggcgggatgaaacagcgggtgctgatagccatcgccattgccctgcagccggatctgattattgctgacgagcccaccagcgccctcgacgtcacggtgcagaagcgcattctcgacctgctcgatatcctgcgtcgcgagtcgggtaccgccgtgctgtttgtcacccacgatctggcgctggccgccgaacgcgccgaccggatcatggtgtttcgccagggagagattcaggaacaaggcgccaccgagacgattgtccagcgtccacagcatccttacacccgccagctgctccacgacctgctggatgcgccgttggggctgacggcggcgcgtcaccggccgctggccacgccggccattcgcgtggaggggatcagcaaacgcttctcgctgggcaaacaggcgctgcaggcgctcgacagcgtcagctttgaggtcagacgcggcagcacccatgcgctggtgggcgaatccggctccgggaaaaccaccctggcgcggatcctgctgggctttgagcgcgccgacgccggacaggtcaccatcgacggtatcgacgccgggcatctcagccgcgaggcacagcgtcagctgcggcgcaagatccagtttgtctaccagaaccccttcgcttcgctcgacccgcgccagacgctgtttgcgattatcgaagagccgttaaaaaactttgagcgcctcagcgcggcgacgcgtcgccagcgtgtggagagcgttgccgcccgggtggccctggcccccgagctgctgtcgcgtacgccgcgggagctttccggcggccagcgccagcgggtggcgattgcccgggcgctgatcctcgagccggcgatactggtccttgacgaagcgacttcggcgctcgacgtcaccgttcaggcgcagatcctcgccctgctgcagcagctacagcagcagctgggactgagctacctgttcattacccacgatctggcgacggtcaggcggatcgccgacagcgtcacggtgctgcgcgccggccaggtggtggagcatggcgacgtaaaccgcctgttcgccgccccgcagcaggcctacacccgcgaactgatcgccgccattccccaggtttcctcccgcttagcacaggcccacacggagaacgcataatgccaaaacgcctcggtttttttacccgtctgctcgatcagggctccgcgcaaacgcgctaccggctggcggccgaacagatccgccacgcggagcgtttgggcttcgacagcgcatggattgcccagcaccattttcatgaacaggaaggcggcctgccttcgccgctggtgtttctcgcccacgtcgcggcgcagaccgaccggatccgcctcggtacggcgattatcaccttgccgatggaaaatccgctgcgcgtcgccgaagacgcggcggtactggatttactcaccgacggacgtctggaggtgggttttggctccggcggcacgccaacctcgtttctgcccttcggcctgaccagcgagcagcgcggggcggcgtttgccgaccatctgcacctgatccatagcgcctggcgcggcgacacgctgagccacccggacaaccgtctctatccgccggcgccgcagttggcggagcgtatctggatcgccaccttctctgcggagggcgccatccgcgccggtcaggcgggacacgggctgatgctgtcccgcacccagccacggccacccggcgagccacgtctgccgctggacgccattcagaacccgatcattgacgcctacctggcggcgctgccggacggcgttgcgccgcggatcctcgcctcgcgcaccgccttcgtcgccgacagtcacgcccacgccctgcaggtcgccgagcccggtctgcgcaagcaggcaactcagcaccgggcggcgggtcatacgatagaaggtgacagtgtcaccgactatctgcaacagcttgatgcccacgttggcgatcctgagcatgttattgcctccctggcgcaggacagcgtgctggcccgcgccaccgatatttcgtttcaggtgcactcggtcgagccttcgcaccgggatacgctgcgttccattgagctgatcgctcagcatattgccccccacatcagataaggagtccccatgacgctgagtcaggatattctggccgaactggcggagatcgcccccggttccccgctcgatcaggcgcgcgccgtccgcgatgccgccacccgtcacgcccagggaagttatgaagtgctgttccgccagcaggacgctgactttcctcttgatgaacgcttcgcggtggccgcgaaggtggcaaaactgcaccaggcggacgcgcttgcggcgcactatgccggtttcggcctcgccgatccgaccaccgatcgtctggtcccggcgctggcctttgcccgcctgctcaccttcacccccgttgaagccactcccggcgcgctgcacaccttaaccagcgcgggctggagcctgcggggcatcgtcaccctggcgcagctggtagcctttgtcagcttccagagccgactgctgctgggcctgcgggcgctcaaccataagcccatcgtcagcgcagatacgccgctggtcgccggatactggcataccaccccgtacgcgcagagcggcaaagcggccccggttcgcttcacccgcgacgagctgcactgggaaccctggctggccgataaaccgctggcggaattcaacgctgaagaacaggcgattctggccaaatatggccatagcgactccccctactttcgcctgctggcgcgcaaccagccggtgctggagcagcggaccctgaccgataggggcattttctataccgcgggaggattgccgcgcgccgaacgcgagctggccgccacggtcgccagtaaaatcaacggctgtatttactgcgcctcggtgcatgcccgcaaagcggcgcagctggcgaaggacgagaccgccgtcgacacgctgctggcggtgacgccgggagaggatctacgcgacgggcaatcgccgcgctggcaggcggaaatcgacgccgccgccgcgctatcggtgacgccacccgcgttaaacgccgatcatctggcggcgcttgatgagcagggcttagatactctggcccagctggatctgctgcagtccgcggcctttttcgcctgggccaaccgcctgatgcttaccctgggcgaaccctggcgtgagtaggcgtcgttagtaagcttgtcgccgctgatggcagccatagatgagcaaggcgctcatcgccagaaacgacagcgcggcggcggggagcgccacgctgttccagccaaagccctgggcgatcatcattccgccgcagaaggcgccgatggcgctgccgaggttaaaggcgatctgtcccccggccgcccccagcatctcgccgcctttggcgttctgcagcagcaggatctgcagcggcgccgacagagcaaacagcccggcgcagcagagaaatgccagcgccagcgaagcgactttctgttcaccgaaggcaaagatcagcagcagcgtcacggctatgaccccgtcggtcatggccgcaatgcgcagcgggctgtagcgcccggaaatcttgccgctgaacagattgccgaccaccattcccagccccgccagcatcataatcagcatcatcttgctttcagcaaagccggagacgttgagcataaagggcttgatatagctgaaccaggcaaacacgccggcgttaccgaacatggtggcggcgaaaatcagccacggcgccggggaggccagaaaacggaactgctcgcgcagccgcgtgctggcccggtcataaagcgtgggcacccagcagaagatcgccagaaataccgccacgttaaataccgcgataagcgcaaaggtatagcgccagctgaagtgatgcccaagccaggtgccgcccgggacgccaaccaggttagcgatcgtcatgccgccaatcatccccgccaccgcggcggtcaccttccccgggggcgcgattttcgacaggataatcgcgccgacgccaaagaacgccccgtggggaaacccggaaaccagccggccaagcgccagcatggcgtagctactggagaaggtaaacagggtattgccgagaatacacaggccagccaggaacagcatcaccgatttcagggaaaaccggctggagagcagcgccatgatcggcgcgccgatcaccacgccgaaggcataccaggcaatcatattgccggcggcgggtatggatattccgacatcgtgcgccatatccggcagcacgcccataatgccaaactccgccatgccaagtccaaaggtgcccagcgccagtgaaaaaatcgtttttttcatacatcttatagggatattgagagccggccggcattatttaccatcccgccccgacacaccagctaaaaacgcccgacggcagtttcctccatacaacagcctgattcgttcatgttccccagccgcgtggcataccggcggcgtggtttcgtagaaacaatccactatcaaaatcagtgagctcaaagagataaacacctcattgatctcaagttaacttgaggttgtaaagtcaaaacatcgttcaccttgggagaattatccatgcaaagtgttgatgtcggttttactcatgtcgcctttaccgtccgctgtctggccagcagcatcgatttttatacccgctataccgcgatgaccatcattcaccagcgcgagcccgacctcccctcggcgcggaaagtggcatggctcagcgaccgcacccggcctttcgccctggtactggtgcaaagtgacgatccggccgatacgccgctgggaccgttcggccatctcggcgtcgcctgcgccacccaggccgagatcgatgagaaagtggccctcgcacggcgggaaggtgttttacgccgggagccggagcagctgggcgatccggtgggctatttcgctttctttgccgacccggacggtaacaccctggagctgtcgtgggggcagcgggtgggactggaagtcatcctggcgggaaaacccggcgaataattttccaccgcctcgccgggggaggattacacttcaaagggatacctcggcaacacggagcatggcgatgggcaacaagaaaagcggtaatccggtcgacacggcggcaaaaatcgcgccgctcgacaacaaagcgtacgagaaagcgctgcgcaaactccacgttgagctggtgaaactgcagcgctgggtggtacacaaaggactgaaagtgtgcattgtctttgaaggccgggacggcgccgggaaaggcggcaccattaaggccatcaccgagcgcgtcagcccgcgtatcttccgggtcgtcgccttaccctcgcccaccgagcgcgaaaaaagccagctctactttcagcgctatatcaagcatctcccggcggccggcgaaatcgtgattttcgatcgcagctggtataaccgcgccggcgtcgaacgggtgatgggcttttgtacgccggaggaggtgcagaagttcctcgacggcgcgccgatggtggagcgcggcatggtcgaatcgggcattattctgctcaagtactggctggaggtctctccgcaggagcaggagcgccgtctgcgggatcgcatcgacgacgggcgtaaaatctggaagctctcgccgatggacattaagtctttcaaccgctgggatgaatataccgctgcccgcgacgccatgttcgccgccaccgataccgcctgggcgccgtggttcgtcgcccgctcggaggataaaaagcgcgtgcgtctaaatatcatcacccatctgctgtcgcagatcccctatgaagctttaccggtggagcctgtgacgctgccgaagcgcaaaattggcaaaatgaaacagactaattttcctttccgcttcattccagagaagttttgattatttcccgtcgcgctggttaatgccagcgccaggtttattaccataaccatgaatatttcaggctgttacttccctctggaagctgtctcgcaaaataaatattaaacttactgctggtatttattttttagtgggtaaagtaaataatcacagaaccaaccgcaaggagcctatgatgaaaagtaatacgctacgtaaaagacccactgacgtacccgtccagaaggcgtcagaacagccaggtaaggatttacgagaagcggataaacagcgacagcacaaggaattcattgccgcaatgaatgaatttattacaaaaggaggcactcttactgatgatgaatttttcagggtgctatgatgcttgaacaattcaatgtttatcgaaattgttctgctcagacaaataaaaccctgccatattatatgatcgtgcagaatgattattatacagacctggccacgagagtcattattcctttaatgcgaccacaacagttaccacgctggcatcagcatgtcgtaccaaggataaatatagaatttgacagctttttactttgtacgccaatgagcagtaacttaaataataaacggatcccgccacaggatttcgtctgcaatctgagtcatgcgcgccagggcgttatcgattcaatcgatactcttatcacgaactgctgactgccgggaatccgctccgacatcctcggagcgggtttcgcgccgtgaaggcttacttcatcccttcacgactctctttcatcgcctccaggcgttcgacatcgcgataccagcgcgggtgatgtttcttcgcccagcggcggctcaccttgccttcgatcatgcccttaatcgaccctttgacccagaatgccatatacatatggataaggatggcgtggatcagaatgatggccgacgtcgcatgaatcagcaggctatagcgaatcacctgcatcgggaaatattccgcaaaatatgggcgccagataatcaccccggtcaccagcagcacaaatatcatgctcatgatggtccagaacatcatcttctgcccggcgttatacttaccgacgcgcgccaccttatgctcgttgcctttcagcacctcgacgatgcctttcagccacggaatatcctgtttatcagggatgttgtggtggacaaagcgcacgaacataaacatcagcgcgacaaaaatcagcaccccaaagaacgggtgcagaatacgccccatctgcggcgtgccgaaggtttccgttagccactgtagcgtcggaaagaagaacgatattcccgacagcgccacgaggaagaaacagataaccaccgtccagtgacaggcgcgatcgataaacgtcgtgcgcacaatcatcttcgatttactcatcatgcttctcctcgtcgtcgtcaacttccttgttcggcccgataccgatgtagtggtaaatcagcccggcgaaggtggcgataaagcccgccgccgccagcggtttcagcgcccccttccacagactgatactggtatcgatctgcggttccttcggcagcttgtgatacagctccggctggtcggcatgatgcaggacgtacatcacgtgggtgccgccgacgcccggcgggttgtaaatcccggcgttggcataaccgcgttttttaagcttagccacccgctcctcggccacctccagcatctctttcttcgtaccgaagtggatcgcgccggtaggacaggttttcacgcaggccggctcctggccgacgctgacccgatccacgcacagggtgcatttatagacccggttatcctctttattgaggcgcgggacgttaaacggacaccccgcaatgcagtagccgcagccgatgcagttttcctgctggaaatcgacgatgccgttggcgtactgaataatcgccccggcggacgggcaggctttcaggcagcccggctctgcgcagtgcatacagccatccttgcggataagccactccagtttgccgttctgttcggtctcgctaaaacgcattaccgtccaggatttggcgctgagatccgccgggttgtcgtacaccccgacgcagtgccccacgtcatcgcggatgtcattccactcggaacaggccacctggcaggctttacagcccacgcaggaggagacatcgataagcttggcgacttccgctttatagtcccgcgcgcgcggcgcgggggtgatcgggttggtcgcggagcgtttaataatgtcttgggtttccatcgccattgaatcgctccttacgctttctcgatgttgaccaggaacgccttgtactccggcgtttgcgagttggaatcgccaacgttaggcgtcagggtgttggcgatgtagcctttgcgggccacgccttcaaaaccccagtgcagcgggatcccgacggtctccacctgctggccgttgacgttcagcgtgcgcagtcggcgggtcaccacggcaaccgcgcgaatgaagccgcgcttgctgctgactttcacccaatcgccgttagcgatacctttgcttttcgccagcccttcgctgatttcgacaaactgttccggctgcgcgatggaattgagcaacgcatgcttggtccaggtgtggaaatgctcggtcagacgataggtggtcccgacatacgggaatttatccttcttacctaagcgaatggcgtcctcttcatacaaccgcaccaccgggctggagaccaccttcgggtgcagcgggttagtgccaagcggggtttccatcggctcgtagtgctccgggaacggcccttccgccagtttatcgagcgcaaacaggcgacccagcccctcctgctgcatgataaacggcccggtgttgctccctggcggcgcggtattgaagtccggaatatcattcccgacccacttgttgccgttccactggatcagcatccgcttcgcatcccagggcttgccgttgatatcggccgaagcgcggttgtacagcacccgacgattgagcggccacgcccaggcccatcccagcgtattgcccaggcccgaaggatcggcgttatcacgattcgccatctggttaccctgctcggtccagctgccggtatagatccagcaagacgacgcggtgctgccgtcatcgcgcagcagcgcgaagctattgagcagttggccttttttcgccagcaaagtgccattttgatcgtagagatccgccagcgcgtagccgttgttctcttttgccacctcttccgattccggatggtccggctgcttgtagcgccagctcatcttcagcaggggttccgcgcccttcccgccttcggtgcggtacagttcgcgcaggcgatggtaaatcccggcaaggatttcgccatcattgcgcgcttcacctggggcatcctgacctttccagtgccactgcagccagcggccggagttggcgatcgaaccgtcctcttcggcaaagcaggtcgacggcagacggaagacttcggtctgaatcgccgacgggtcgacatcattagactcgccgtggttctgccagaaggtcgaggtttcggtcaccagcgggtcgataaccaccatatatttcagcttgctgaggctgcgaaccactttgtttttgtccgggaaggaggcaaccgggttaaacccctggcagatatagccggtgacgttgccgttatccatcatattgaagtatttgataacgtcgtaagcctggtcccacttcggtaaccactcaaagccccagtcgttctctttttgcgccgcctcgccgtagaaggatttcatcaggctaacgaagaatttcgggtagttgctccagtagttcacctgctcgggcagggtcgccttcggcgtgttggcgctgaggtagctttgcagatcggtctgtttgtccgatggcagcgtcaaatagcccggcagactggtcgacagcaggcccaaatcggtcagcccctgaatatttgagtggccgcgcagggcgttgacgccgccgccggccatccccatattgccgagcagcagctggatcatcgccatggtacggatgttctgcgcgccgacggtgtgctgcgtccagcccagggcatacaggaaggtggtggtgcggtccgcggcgctggttgaggccagcacgtcgcacactttaaggaagtccgctttcggcgtaccgcagatgttttcgaccacctcgggcgtgtaacgggaaacgtgctgcttcagcagattccacacgcagcgcgggtgggtgagcgtttcatcgcgtttggcgtagccgttttcatcgaactggtagttccaggacgatttatcgtactggcgtttttccgcatcgtagccgctgaacagcccctcttcgaaggcaaaatcatcccgcaccagcaggctggcattggtgtaatgcttaacgtactcggcattgatcttattgttttcgatcaggtacagcagcacgcccgacaggaaggtaatgtcggtaccggaacgaatcggcgcatagatatcggccaccgacgcggtacgcgtaaagcgcgggtcgacgacgatcagcgtggcgtcgttattgtttttcgcctccatcgcccagcggaaacccaccggatgggcttcggcggcgttaccgcccatcaccaccacgacgttggcgtttttgatatccacccagtggttggtcatcgcaccgcgaccaaatgttggagcaagacttgctaccgttggtccgtgtcagacgcgcgcctggttgtctaccgccagcatacccagcgatcgcacaaatttttgcgttagcatgccggtctcattgcttgccgccgaggcgcacagcatgccggtggaaagccagcggttaaccgtcacgccctgttcattcttttcaataaagttggcgtcgcggtcggctttcatcagtcgggcgatgcggttaaaggcttcatcccacgagatgcgctgccatttatccgagcccggggcgcggtattgcggataacgcagacggttttcgctgtggacatagtccagcaggcctgcccctttcgggcacagcgcgccgcggctcaccggatggtccgggtccccttcgatatggtagatcgcttctttggcgtttttcgcaccgtcgccgaggctatacattaatagcccgcagcccacggagcagtaagtgcaggtgttgcggatctctttcgcacgcagcaatttgaaattgcgtgcctgagccaacgccattttaggggcaaagcccagggcggcggcggtagttccggccataccgcctgcgcagatcttaaagaactttctgcggctgacgtccattgcattcctccatgcaggatgttgattcatcgcgcggaggaaactaacagcaaaatcccgggaaaatttgcgtcaaatcaaggaggaaaaccttcgcccccttaatcgccagccctggccattttcgctaatccctaagggttagcaacggcggaaaatttcgcccctcaccgataaaaagatgatatatatgccggctgcatttgcgtaaccatcaggaaaagcatggagaaaaagagagccacgacgatcggcttcgccgccattatcttatggagcacgatggtcggattgattcgcggcgtcagcgaaggactgggagcggtcggcggcgcggcgatgatttacagccttagcggcctgctgctgatctttaccgtcggctttcccaacctgcgccagatcccgcgtcgctatctgctggccggcagcgtgctgtttgtcagctatgaaatctgcctcgcgctgtcgctgggctatgccgccagccgccagcaggccattgaggtggggatggtcaattacctgtggcccagcctgacgattttattcgccattctctttaatggccagaaaagcagctggctggtgatccccggcctgattctcgccctgctgggcgttggctgggtgttgggcggtgagcatgggctacagcccgatgagattatcagtaacgtcatttccagcccgcttagctatctgctggcctttgtcggggcgtttatctgggccgcctactgcacggtgacggccaaatatgcccgcggtaaaaacgccattacgctgttcgtcctgttaaccgccctgacgctatggctgaaatttctcgccagcgaccagccgccgatgctgtttagctggccggtggtcattaagctgatgacggtctccgtggcgctggggctggcctacgcggcgtggaacgttggcatcctgcacggcaacgtcagcctgctggcggcggcctcctacttcacgccggtgctctcctctgcgctggcggcgatcctgctgagtgcgaccctgtcgtggtccttctggcagggggccgggatggtatgtctcggctccctgctctgctggtacgccacccgccgttagccgagatcgcctccggctaccggcagcgtcacgccggtgatatagctggcctcatcgctggcgagaaacaggatcgcattcgcctgttccgccagcgtgccgtaccggtgcagcagactgctcgccaccgtctgatcgacgacctgctgataccacgccttttcctgctcgctcggctgctcttcgttacgcggcgtcaggcgcggcggcgcctcggtcccgcccggggccacggcgttaatccgaataccgctgccgctgtactccatggcaatcgaccgggtcagcgcgttaacgccgcctttcgccgccgagtacggcacccgattcactcccgccgtcgccaccgacgaaatgttgacgatgctgcctttgccctgcttcagcatccatggcagcgccgcgcggcagccccatagcgtggggaacagcgagcgacggatctctttctcaatctgctccggctggtattcggcaaaggggcgcgcccagatggtgcccccaacgttgttgatcagcacgtcgatacggccaaaatgagcgaccccggcggcaaacgcctgctcggtactttcccacgcttccagatccgcctccagcgccagcaccagacagccggattgcgccagcgtcgccgccagctcatggacgtatgacgagcgatcgatgagcagcagagccgcgccttctgcagccgcctgctccgccgtctggcggccaatgccctgcgccgcgccggtgatgacgacgactttatcggtaaaacgcattttgtctccttatgccgccgcgctctggctggcgataaatttctcataccagaaccccgccggggtgatcccgcggtcgcgcaacgccgtggcaaccgcgttaaccatcggcggcgggccgcagagatagatgtccacgtcgccgttgttcagcatcgcgtcgtcgagatggtcggtgacaaagccgcgctgcgggcaagtgctgttttcatcggccaccaccggtagccaacgataccccgtcagctgttgaataaaggtatccagcgcgtcggttttcaccagatcgcagtcacgagtaacaccgtacagcagcatcaccggacgctggctgccctgtgtctgcagggtatggagcatggagagcagcggcgccaggccggtaccgcccgccagcatcagcagcggacgttcgccgtggcgcagatagaagctgcccatcgggccgctgagggtaagacgatcgccgggccgcgcccgctgggttaaccactggctcatcatcccgccaggcacgttacggatcagaaaacgcccttcgagggagcccggttgcgagctaaatgagtaggcgcggacatgaagcgtacccggcacctgaatgttgacgtactgccccggcaggaaggccagcggctcatcgagggcgaccaccagttcgatggcggtatcggacagtaaattcacctgccgcacctgcgccccgagcgtcgccagggccgttttgcactgggcagcggccaccggcacatcgatcacgcagtcgctggtcgggaccatctgacaggtcagcacctgacgggcctgcgcttcgtcgtcgcttaacgcctcgtcgagataatcttcgcccaggtcgtactcaccgctggcgcagtggcatttgcaggtaccgcaaacgccgtccgagcaatccatcggcagattcaccttctggcgataggcggcatccaggactttctctccggcattgcactgaataaaacgggttacgccgtcctcaaaattaagagcaatattgaaggtcataagcgcctcttaaatgtggtaaacgtcaatcacctgacggatatagtcgttattcaggcgcacagttttacggacgatctgcggcctgccgtcctgctcaattagcgtgcagcaggtagagccaaaataggcatccgtgtgctgatagcgatggctccaggtgacccagctgtaacgcacctccagaccctcgtcgctttcgcccagcagctcaacgttgctgatgatatgggtggtccgcggctctggcgtgctggccccggagcgctcggttttaatgcggtagacgcgatcctctagcccttcgcggttggggtagtagataagcgaaatctctttttgcgggtcgcgggtcagctggtcatcgtcgccccacgccggcatccagtagaccacctgcgggctgtagcagctgagccattcgtcccactgacgatcgtccagcagacgggcttcgtagtagagaaactggcgaacctgttcgaggttaagcatcaggccacctccacgcgctgggtaatggactggtcgtaacgctgttgttcctgttcaatggccgccagcatcagcgtctgccagtggtggtgatgggcgatgtacagcgcttcgtcctccgatttcaccccgcttaaccgcggcgaaaagccggcatgttgcgcatgctcatccgcgccatcgacccagcgcagcgcgccgcggctgaggtcgctccatggcagattttcgccgagatagccgcgctgacaggcgctgaactcttcgaggtcgtccggcgtccccatcccactgacgttaaagaaatcctcgtactggcggattcgcagcgctctggcctggtcggattcccctttcggcgcaaagcaccagatggtgacttcggttttatccaccgcaatggggcggattacgcggatttgcgtcgagaactgatccatcaggtagacattggggtacaggcacaggttgcgggtttcgttgaccatctggtcggcacggcgttcgccaaattccgcctgcagccgttcgcggtgggcatagaccgggcgcacttccgggttgagcgcccgggtccacaacagcatatggccgttatcaaatccatagccgccgccgaggctttttgaccaaccgttggcatccaccgcgtgcgtcccttccgcttcatagttgcggcgtgacatggttgaggcatagttccagtggaccacgctgacgtgatagccatcggcgccgttttccgcgcccagtttccagttgccctcatatacatagctcgacgaacccttaagtacctcgagcccctccggcgcctggtcgacgatcaggtcaataatcttgcaggtttctccgagataggcctccagcggctgcacgtcggccttgaggctaccgaataagaaaccgcggtaagactgaaaacgcggcaatttttgcaggtcgtgggagccgtcttgtttaaagctcggcggatagccgccggtgctctcatctttggcttttaataatttgccgttattgctgaaggtccagccgtgaaacggacaggtaaacgaatttttattcccggttttgcgtcgacataacatggcgccgcggtgggcgcagctgttaattagcgcgtgcagctcattctttttatcgcgggtaataataaccggctgccgtcccagcgtcagggtataataatcacccggctggggaatttgactttcatgagcgagaaatacccagttaccttcgaaaatatgcttcatttcaaattcaaacagctgcgggtcggtaaatatagagcggtggcagcggtaaatataattttcacggtcgacaactaaggcattattgattttgtctttgagcgtcgagagcgttttttgcatgagtcggtccctcctgcaggattcaggatgaaagaaacagggtgaattcttcgttttcgagtgcaatatctggcccgggcagtagcgtgcccggggccgataatgccgcttactctttggcgcgcacgcggatcccacgctgctcttcgtcggcgctcagcgctttacacagggtgaaatcaaaacaaacctcggtgtgctctccctcaagattgcgctgcgcgatgatctcgcggtcggtcacttttaccggatcggcaatcaggccgtcgcgggtggcaaaggcaaaatcgtcccacaggtatttatcgccattgaggttaatctggctggtcagatgtttatgacccggcgcggagacgaaaaagtgaatgtgcgccggacggttgccgtggcgacccagtctgtccagcagtttctgggttgggccatccggcgggcagccgtagccggagggcatgatgctgcgcacgctgtagcggccatcggcgccggtgcggatccgccggcgcaggttgtactcactctggcctgggtcgaagaaggaataatttccgagggtgttggcgtgccagatatcaacaatagcgttggccactggccgaccttcggtgtctttgacttcaccgtgcagccacatcacttctccggcgtcggcgccatcatccatgcgggcgtgaccctcggccagcggcgcattagccacgtacagcggcccttcgatggtgcgcggggtgccggtttcccgatgcgctgccgcgtcgatggcgtcctggcgcagatcgaggaaatgctccagtcccagacccgccgccagcagcgccgcctcctggcgcccgcccagctcgtgcaaatagtttaccgcgtgccagaactcttcttccgtaacgttatagtcgtcgatgagcgtgcagatattttccagcagacgatgaataatcgccttaaaacgttcatcgccgccggcaacatctaatccggcactgtcgcgtaataatttctgaatagctggttgttgtacgaatacattactcatactggttctctcttatattttgcagggtatacgccggtaataccggcgtgaggtcagatattattattagcgatcgtcatcgcgaattgatgacggatgacgacagagggcttccacttttatcgccataaagggatatagcggcaatcccattaatatttgatgcaattcttcggcatcttgaacatcgaaaatactgacgttggcataaaggccggcaacgcgccagatatgccgccatttgccttcccgctgtaattgttgcgaataggctttttcgcgttgttttatttcctccgcctcgttggcgggaaagccaggcggaatattgacggtcatctccactttaaataacatttttttctcctgttccccgctacggctggcgggtataaaaatgcagtttgtcttcatccagctcgacgccaagtcccggcgtttgcggcagcgccacctgaccgtcggcaaaggtgagcggcacgctgacaatatcgtctttcagcaacagcgggccgaacatctcggtaccccactgcagcggcagcgtcgaccaggcgtgcagagaagccacggtccctacggtgccttccagcatggtgccgccgtacaggccaatccctgccgcctgcgcgacgcgggccagcgccagcacgctgttcggccccccggctttggcgattttcagcgcataagcgccggtaaagccctgctgcgccagctgataaccatcgtaagcggtcgcgaccgcttcatccgcgaggatcgcggtttcaatttgctggcttaaccgcaccagggcggcgttatcgtgggcgctgaccggctgttcgataagatcgacgcccatcgccgccagttcgcggcagcctttcgcgccggtggcggcgtcccaggcctggttgacgtcgacacggatgctggcgcggtcgcctaacgcttcaacgatggcgcgggtatgacgcaggtcggtggcgagttcacgcgcgccgatcttcagtttgaacgcccggtggcggccttcggccaacagtttttctccttcagcgatatctttcgcggtatcgccgctggctaaggtccacagcaccggcaacgccgtttgcagcgcgccgccgagcagggctgataccggcagacctaaggctttgccctgagcgtcgagcagcgcggtttcgatggcggacttcgcaaaggtgttgcctttaatggcgccgttcatgcgggcggtcagcgcattcaggttatcggccggctgcccttttaacagcggcgtcagataatgggtgatcgccgacgagatggcctcggggctctcaacgccatagctcaagccgccgatggtggtggcttcgccgatgccgcagatgccgtcggaacgggtaaggcgcacgatcaccagcgactggcagcccatggtggtcatcgacaatttatgcggccggatggtcgggacatccacaatccagctctcgatttgctctacggtggcagtcattttctgttcctgatgagatatataactttttgtacccacatccataacgggggtctgtgccattgacaatagggttcagcctggcggatggtcaacggcgataatcgaaatgttgtgcgattatcgacgcgtttgttaaaagacggttattaatgtgatcatggtggtaaaaccggcacaattcagcgcgccccattttgcgcaaggtatagtgatctgccgtgagctttacgctgcaacggagaaggatgcgatgagcgacaatatacccaatacgctgagcgccaggcaggccgagcacgaccctaactttatgctgtctctggcccgcgggcttgaggtccttaacgccttcaccccccagcgccagcggctgaccatttcccagctcagccagaaaacgcaaatctcgcgcgcggcggtacgccgctgtttgtataccctcgccgcgctgggcatggtgcacagtccggatggccgtagctatgaactgctcccccgggtgctggccgtcggccacgcctatctggcaggcacgccgctggccaaggtggcgcagacggcgctggataatcttggcaaagcgctcggcgaatcctgttcggcggccacgctcgacggggataacgtgctctatattgcccgcgcggcggtcaataatttactgagcatcgatctggggcgaggcagccgcctgccggcgtgggccacgtcgatggggcgggtgttgctgagcgcactgccggaggaacagctggaagtgacgttgtcacgggctacgcttattcgctacactccgcataccctgtgcgatttgtccggtttacgtgcagagatcgcccgggtgcgcatgcagggctatgccctcgccgaccggcagatcgaggtaggcttgtgctcgctggcggtacccgtgctgtcgcgtcacggtcaggtggtggccgccctgaatgtcggggtacctgccgcgacggtcagcgccgcggcgttaaaagagaaggctctcgccccgctacggcgcgcggcgatggatctgtcgctgcagctatagcgccgactgcggtttcgccacggtggcgaggctgcgccagatcccggcggccagcagcagaagcaatacacccgccgtcgccagcaccaggctatgagcctgaataaaagccgtcttcgccgccgccatcagcgcctgcgccaccccggcgggcagcgcctgggacagactcaccgcctcgccaatcgatgacgccgcctgctgcgccatggcgccactcaggccagacggcagcgcaatagaggcgctgtagctgcgggtcaggatcaggccgaacagcgctatgccgagaccggcgcccagctcataggccatggtttcaatcgcccccgcggccgccgctttctccttcggcgctgccgccataatcgcggaactggaggccagcagcgcgctggccacgctaaagcccagcagcgtcatcagcccccaggccagccactgctgggtactgaaatcggtcaacgccaggccgagaaagctgaaggcgctgagcagcatcccgccggtcgccacctcgcgcagcccaagccgcgacaccagcaggccggcaatcgggccgctgaagccgctggccaccattaccggcagcataaatatccccgcctcgaacggcgttttctggtgcacaaactgcagctcctgggccatcagcagctcaaaaccgaccagggtaatcagggccgtcatcgccatcatcaccccgcttaagattatgcgatgggtgaacaggcgcatatccaccatcgggcgggccgccgacagctgcttgcggataaaccaggttaacatcgccgccccgccgagcgccaccagcgcggtgagccacagcgccagctggcccttcagcgccgatttcgcgctaaacaccagcatcaggatcgcggcaatcaaaacgagcgcctgcagtagattgagcggctgttcgcggcgcgcgggctggcgcggcaccactttcgcgttaatcgcgataaccaccagcacgatcggcacattgatcaggaacaccgacccccagtagaaatgctccagcaggatacctcccaccagcgggccgaaggccgcgccgccggagccgaccgctgcccacagccccagcgccatattgcgctggctggcctcggcaaaggtgctgcggatcccggccagcgtcgccgggacgatcatcgccgcccccaccgccagcaaagcgcgtgaggcaatcagcgtcatggccgtcggcgacagcgcggcgcacagcgaggcgatgccaaaaatggcgctgccgagcagcagcaggcgcttaaagccgatcttatcgccaagggcgcccatcggcagcaccatcccggccatcactaatgagtagatatcaatgatccacaacagctcattgccgctgctacccagcgccacgctgagggtcggcgcggccacatgcaacaccgtagcgtcaatcgccaccggaatataaaccagcaaaatcgccatcagcgtcatccattgccgtgacatagcttgtacctcaatcaatattgaatattggacacacgtccaggatggcgatcctgccggattgttgaacacatgtccaactttttgttacactcggccaaagccagatgacagcggggttctatgcactatttacaacgtgatgcgcgacgggaagggattatgcaggccgccatgcgcctggcgctgcgcggcggctttgccgccatgaccgtgcggcagatcgcccgcgaagcccaggtggccgccgggcagctgcaccaccacttcacctccatcggcgagctgaaagcgcaggttttcatccgcctgatccgcgagatgctcgacatgccgctggtggctgaggacgccagctggcgcgagcgcttgttctcgatgatcggcagcgaggatggccgactggaaccctatatccgcctgtggcgcgaaggccaggtgctggccgacagcgatccggacatcaaagcggcctacctgctgaccatgaatatgtggcatgccgagaccgtcgccatcatcgagcagggcctcgccagcggcgaatttcggtcggctgagcccgcggcggatatcgcctggcgctttatcgccctggtgtgcggcctcgacgggatttatgcgctggacgcgcaggccctggatgaggcggcgtttagccgctatgtaaataagatgattacgctggagttgttttaggcatatttacatttagtaacaattaattccgctacgcttaccacgtgctctctgtcagcacgttttttttatctacgcttcatagataacgcaaattaagcgttattcactatccccttgtattcagctgttgaccttatttatttactcctttccgggcaagtagagggcaatatgtcggtgcagaatgataaagataatcattaccttttgaacaactggcggcctgaaaacaaggcgttctgggaaaataaaggccaagccattgcgcgaagaaatctatggatatcagtggcctgcctgctgcttgctttctgcgtatggatgttattcagcgccgtagcggtcaatctcaataaagtcggttttcatttcaccaccgaccagctttttttattaaccgccctgccttcactttccggcgcgatattacgggtcccctactcctttatggtacccctttttggcgggcgctactggaccgtattaagtaccgttatcctgatcgtgccttgtatttggttaggggtggcaatccagaatattactactccgttctgggtatttattattattgcgctgctgtgcggttttgccggagcgaattttgcttccagcatgggaaatatcagtttctttttccccaaagcgaaacagggcagcgcgctgggagtcaacggcggccttggcaatctgggcgtaagcgtgatgcagatggtcgccccggcggtcatcttcctgccgctcttcacctttctcggcgtccatggcgtcacccagcccgatggttcgacaatcaccctgagtaatgcggcgctcgtctgggtaccgctgctgctgctcgccaccgtcgcggcatggttcggcatgaacgatatcgccggttcaaaggcctcgattcgcgatcagcttcccgtgctcaagcgaccgcatatgtggctgttaagcctgctctatctggcgacgtttggctcgttcatcggcttttccgccggctttgccatgctggcgaaaacccagtttcccgcggtcgatatcctcaagctcgccttctttggaccgttcatcggcgcgctggcgcgctcgttcggcgggatcatctccgaccgtctcggcggcgtgcgggtgacgctggttaacttcgtcctgatggcgctgtttaccggcctgctgtttctgaccctgccaggcagcggctccggcagctttctcgctttctacgtggtgtttatggggctctttttaaccgccggtctgggaagcggctccaccttccagatgatcgccgtcatcttccgccagctcaccatcgacagcgtaaaacagcgcggcggcagcgatgaagaagcgcagcacgaggcggtgaccgataccgctgccgcgctgggctttatctcggcgatcggcgccatcggcggcttctttattccgaaagccttcggcacctcgctggcgatgaccggctcaccggttggcgcgatgaaagtcttttttgtcttctatgtggtttgcgtgctggtgacctggctggtctacggccgccgtaaatccgcttaaccataacgatttatctgtcggatagcggcttacgccttatccggccttacgagttcgttcgctcatccggccgggtggcacgatgccggacattatcggagcaggagaaatgtcatgagtaaacttctggatcgctttcgctactttaagcagaagggcgagacctttgccaacggccacggccaggtctacaacaacaaccgtgactgggaagatagctaccgtcaacgctggcagttcgacaaaattgtccgctccacgcacggtgtgaactgcaccggctcctgcagctggaaaatttacgtcaaaaacggcctcgttacctgggaaacccagcagaccgattatccgcgcacccggccggatctgccaaatcacgaaccgcgcggctgcccgcgcggcgccagctactcctggtatctctacagcgccaaccgcctgaagtacccgctggcgcgtaaacgactgattgagctgtggcgcgaagccctggcgcagcatcccgacccggtgctggcatgggatagcatcatgcaggatccggcaaaaacccgcagctataaagcggcgcgcggcaaaggcggttttgtccgctccagctggaaagagctgaaccagctcatcgccgccgccaacgtctggaccatcaaacattatggcccggaccgcgtcgccggcttctcgccgatcccggcgatgtcgatggtctcctacgccgcgggcactcgctatttatcgttgattggcggcacctgcctgagcttttatgactggtactgcgatctgccccccgcctcgccgatgacctggggcgaacagaccgacgtgccggaatccgccgactggtacaactccagctacattattgcctggggctccaacgtgccgcagacccgaaccccggacgcccacttctttaccgaagtgcgctacaagggcaccaaaactatcgccatcacgccggactattcggaagtcgctaagctctgcgaccagtggctggcgccgaagcaaggcaccgacagcgcgctggcgatggccatgggccatgtgatcctcaaagccttccacctcgataacccgagcgattactttctcaactactgccggacctacaccgacatgccgatgctggtgatactcgagccgcgcgacgacggcagctatacgccgggccgtatgctgcgtgcttccgacctgcttgacggtctcggagaaagtaataacccggaatggaaaaccgtggcctataacagcgacggcgaactggtggcgccgaacggctccatcggctttcgctggggcgaaaaaggcaaatggaatctcgaacaacgggcagacggcaaagatgtcgagcttaagctgtcgctgctggatattcgcgacagcgtggtgtcggtgggcttcccctactttggcggcaacgaaaacccgcattttcgcagcgtagcgcagtcaccggtgacccttcacccgctaccggctaaacagctgacgctggccagtggcgaaagcggcctggtggtcagcgtctatgacctgattctggccaactacggtctggatcgcgggcttgacgatgtcaatgcggcgaaggatttcgccgaggtcaaagcctataccccggcatgggcggagcagatcaccggcgtaccgcgtcaacatatcgaacaaatcgcccgcgagtttgccgatacggcgcataagacccacggccgctcaatgattatcctcggcgccggggtgaaccactggtaccacatggatatgaactaccgcgggatgattaatctgctggtattttgcggctgcgtcggccagagcggcggcggctggtcgcactatgtcggtcaggagaaactgcgcccgcagaccggctggctgccgctggcgttcgccctggactggagtcgtccgccgcggcagatgaacagtacctcttatttctacaaccacgccagccagtggcgctacgaaaaactgaccgcgcaggagctgctgtcgccgctggccgacgccagcaaatttagcggcagccttatcgacttcaacgtccgtgcggaacggatgggctggttaccctctgcgccccagctcaacgtcaacccgctgaccattaagcagcaggccgaggccgccgggctctcccccgcggagttcaccgtccagtcgttaaaatcaggcgatattcgctttgccgccgagcagccggatagcggcaaaaaccatccgcgcaacctgtttatctggcgctcaaacctgctgggatcgtccggtaaggggcatgagtacatgttgaaatacctgctcgggaccgacagcggtattcagggtgatgaactgggcgccagcgatgaggtaaaacctgaggaagtcgagtggcagaccgcggcgattgagggaaaactcgacctgctggtgacgctggatttccgcatgtccagtacctgtctcttctccgatattgtcctgccgaccgccacctggtatgaaaaagacgatatgaacacctcggacatgcacccgtttatccacccgctctccgccgccgtcgacccggcctgggaggcgaaaagcgactgggagatctacaaggatatcgctaaatccttctcgcaggtctgcgtcggccatcttggcaaagagaccgatgtggtgctggtcccgctgcagcatgattcccccggcgaactgtcgcagccgttcgaggtgcttgactggcgcaagggcgaatgcgatctgatccccgggaaaaccgcaccgtcgattgccctggtggaacgcgactatcctgccaccttggaacgcttcacctctctcggcccgctgctcgataagcttggcaacggcgggaaaggcatttcgtggaatacgcaaagcgaagtcgatttcctcggcaagcttaactacgtcaagcccgacggtccggccaaaggccggccgcggatcgacagcgccattgacgcctccgaagttattcttagcctcgccccggaaaccaacggccaggtggcggtgaaagcctggcaggcgctgggagagtttaccggccgcgatcatacccatctggcgctcaataaagaggatgagaagatccgctttcgcgatattcaggcgcagccgcgcaaaattatctccagcccgacgtggtcgggactggaaagcgagcacgtctcctacaatgccggttataccaacgtgcatgagctgatcccatggcgcaccctctccggccgccagcagttgtatcaggaccatccgtggatgcgcgcctttggcgaaagcctggtagcctatcgcccgcccattgatacccgcagcgtcagccagatgaaggccgtgccgccaaacggctttccggaaaaagcgctgaatttcctgacgccgcaccagaagtgggggatccactccacctatagcgaaaacctgctgatgctgacgctgtcgcgcggcgggccgatcgtctggcttagcgaaaccgacgcgaaagagctgggcattgaagataacgactggattgaagcgttcaacgccaacggggctctcaccgcgcgggcggtggtgagccagcgggtgccgccggggatgaccatgatgtaccacgctcaggaacggattatgaatatcccgggttcggaagtgactggtcgtcgcggcggcattcataactcggtaacccgcgtctgtccgaagccaacgcacatgattggcggctacgcccagctggcctatggctttaactattacggcaccgtcggatcgaaccgcgacgagttcatcatgatccgcaaaatgaagaatattgcctggctggatgacgaaggtcgcgatcaggtacaggaggcgaaaaaatgaaaatccgttctcaggttggaatggtgctgaatctggacaaatgcatcggctgtcacacctgctcggtcacctgtaaaaacgtctggagcagccgcgaaggcatggagtacgcgtggttcaataacgtggagaccaaaccgggcattggctaccccaaaaactgggaggaccaggatcagtggcaaggcggctggatccgcggcattagcggtaagctgacgccccgcctcggcaatcgggtcagcgtgttatcgaagattttcgccaacccggtgctgccggcgatcgacgattactacgaaccctttacctacgactaccagcatctgcacaacgcgccggagggcaaatatctgccgaccgcccgcccgcgctcgctgatcagcggcgagcgtatggataagattaactggggcccgaactgggaggagctgctcggcggcgaattcgagaaacgcgcccgcgaccgtaacttcgaagccatgcaaaaagagatgtacggccagttcgaaaataccttcatgatgtatctcccgcgcctgtgcgagcactgcctcaacccgagctgcgtggccacctgcccgagcggcgccatctacaagcgtgaggaagatggcatcgtactgatcgatcaggataaatgccgcggctggcggatgtgcatcagcggctgcccgtacaaaaaaatctactttaactggaagagcggtaagtcggaaaaatgcatcttctgctatccgcgcattgagtccgggcagccaacggtctgctcagaaacctgcgtcgggcgcatccgctatcttggcgtactgctgtatgacgccgaccgcattgaagaggcggccagcaccgaacatgaaaccgacctctatgagcgccagtgcgaggtgttccttaatccaaacgatccggcggtcatcaaggaagcgctaaagcaaggcatcccgcacaacgtcattgaggcggcgcagaaatcgccggtctataagctggcgatggactggaagctggctctgccgctgcatccggagtatcgcaccctgccgatggtctggtacgtgccgcccctgtcgccgatccagtcggttgccgacgccggcggcttaccgagcaacggcaacatcctgccggcggttgagagtctgcgcatcccggtgcaatacctggcgaatctgctgagcgccggcgataccggaccggtcttgcgcgcgctgaaacggatgatggcgatgcgccactacaagcgctcgcaaaccgtcgagggcgtcaccgatacccgcgccattgaagaggtgggcctcagcgttgagcaggtcgaagagatgtatcgctatctggcgatcgccaactacgaagaccgcttcgtgatccccaccagccatcgcgaactggcggaggatgcctttccggaacgtaacggctgcggctttaccttcggcgatggctgccacgggtcagatacgaaattcaacctgtttaacagccggcggatcgacgccatcgacgtcagcggcgtgcgtaagcatggggagggcgagtgatgcggatcctgaaagtgatcggtctgctgctggagtaccccgacgagttactgtgggagaaccgcgacgacgccctggcgctgatcagggccgatgtcccttccctgacgccgtttgtcggtgagctgttgacggctccgctgttggatcgccaggccgaatggtgcgaggtgttcgagcgcgggcgcgccacctcgctgctgctgtttgaacatgtgcatgccgaatcccgcgaccgcggccaggcgatggtcgacctgatgaatcagtatcagcaggcgggtctgcagatcgattgtcgcgagctgcccgaccatctgccgctgtatctggagtatctcagtattctacctcccgcggaggctcgggaggggctgcagaatatcgcgccgattctggcgctgatcggcggccgtcttaagcagcgagcctgcccgtactaccagctgtttgacgccctgctggcgctggctaaaagcccgctcaccagtgacagtgtcacaaaacaggtggcgggagaaaagcgcgacgatacccgtcaggcgctggacgccgtgtgggaagaagagcaggtgaagtttatcgaagataatgcgaccgcttgcgatagctcgtcgatgcaagcttatcaacgacgctttagtcaggatgtggcgccgcagtacgttgacatccgcgccggaggcccgaaatgatccagtatctgaatgtcttcttttacgatatctacccttacctgtgcggcaccgtctttctggtgggcagctggctgcgctacgattacgggcagtatacctggcgcgcctcatccagccagatgctggataagcgcgggatggtgctatggtcgaacttatttcatatcggcattctcggcatcttctttggccatctctttggcatgctgaccccacactgggtctactcgtggttcctgccgatgtcccagaagcagctgatggccatgatccttggcggcgtatgcggcgtgctgaccctggtaggcggtatcggcctgctgatgcgccgcctgaccaacccgcgaattcgcgccacctccacgaccgcggatattttgatcctgtgcattctgctgattcagtgcgcgctggggctgacgaccatccccttctccgcccagcatccggacggcagcgaaatgctcaagctggtggactgggcgcaggcggtggtcaccttccacggcggcgcctcggcgcatctggacggtgtcgcatggatttaccgcgtccacctggtgctcggaatgaccatctttctgatcttccccttcacccgcctggttcacgtctggagcgcgccggtggagtatttcacccggcgttaccaggtggtacgctcccggcgctgagcgctggcggcgtttaccattcatccttaccggtagcccggacgaggccttcgcgccaaatccgggtatttatcgtacctgactccaggctttatgccggatggcggctacgccttatccggcctacaggggcctctcacaggctcaaacctcgcaggcccgcgcaggcgcagcgccgccgggcaagatatcagacacggtacctgtaattccgccgggtggcggctacgccttacccggcctacagggtcctctcacaggctcaaacctcgcaggcccgcgcaagcgcagcgcccgccgggcaagatatcaggcacggtacctgtatcgccgggtggcggctacgccttgcccggcctacaggggcttctcacaggctcaaaccccgtaggcccgcgcaggcgcagcgccgccgggcatgaggagatttacttcccggcttccggatgggtatcgaacgccgccatcaccgccgccagcgccgcttcgctgaagccatgtttaggatcgtccacccccaggccgaaacgggtctgcagcgcttcatacagcgcggagacatcggcaaaatcgaccttctccaccacatggttattctcccagtgggtaaagtggaagttggtgagggtcattttgccgccgtccgggagatgacgacacatcagcagatggtgacggaagtgggactgcggccagtgcgccgaccagaaattgcccatcacataatcagacgcatactggcggcctaaatcgaaatggtacatcgactgccagtgttcgtgatggttgaactgcagcgtccactcatccccttcatgcaccagacgatagctgccgtgcggcgtttgctgtgggatatcggccagcagtttgatcggcgcggtcagcgtctggccgccgaagccgacgtcggcgatccagcgctcccccgccacctccaccagcaacagacggtgagtacgcggcggcatctgcggcgggttggccagcaccacgcggcccagcaggctgcggacgttaaagcctatctcgcgcagcgcgcgctccagcaggccattctgttcaaaacaataccccccgcggcgggcggcgatcagcttctcttccagcgccccatcgtcaaggtggatttcacgcggcagcaggacgtcgaggttttcaaaggggatggcgctgttatgctgcagatgcagttcccgcagggtatcaatggaaacatcaggctcacccgtccagctcagacgggaaaaataggcgcgtaaaaagggactcatcagggcctccagctgtaggtgtccgacatttatagcctatttttccgcgccgaccgtcttttttgtgcgcttagcgttaaccgcacgtgcggcgctgcatcagcgccagcgccgtcagcatcaagaccaggccggtcaacaacgtcaggctggccatcgccatgccctgaccgacggaaccctgttcgaactggcgccagataaacaccgccacggtttgcgtaccggccggagagagcagcagcgaggtcaccagctcccgggaggccaccgcgaacaccatcagcatcgccgccagcagcgccggaaagaccagcggcaggacaatcaaccgcagcgcctgcagtggcgacgccccatgcaccctggcggcgggctcaaggttcgggcccagctggcgcagcgcgctgccgacatagcgcaccggccagggcaacagcaggcagcaataggagagcagcagcatccacagcgtgttatagggcgagcgcggccagaagggctgattccacagcaggatcaaaccgacccccaccaccacgcccggcagcgccgccggcatcagcgacagcgcgtccaccatcccgcgccctttaatcttctgcaccatcaccagccaggcggccagcaggcccagcgcgccgacgattagcgccgaacccagggccagcgacaggctggtgccgagggccgacagggcatctccctgctggtcaaacagcgccgcgaaatgacgcagtgtgacattctcaacactcacgccaccggagagcgtgcccatcacgctggtgagcatcatcgagacggcggggacgccgaccgccaggccgccgacggccgccatcgccagcacggcgggcagcatcatccagcccagcgatgccccgtggttctcccccggcttaccggtgatgctggtgacctctttctcccccaccagccgcctttgcagccaccaggcgaacaacgccaccgccatcagcagcagcgacaatagcgcggcgccagggagatccaccggccagtcggccagctttttctcaataccgaccgtcagcatcaccactcccgcccggctgcccagcgccgccggtacgccaaactcctcgatggcgagggtaaacgccagcagcatccccgccgccagcgccggagagagcatcggtagcgtcacgtgccagaaggcgcgccaggcgctggcgccatggacgcgggcgaccaccgccagccgggtcccgctcgccagcaggctgcgggagacggcaaagtagaccaccggaaatatattaaaggtcatcaccagcacgatcccgctgcggctgaacagcagatcgttcagctgccagccggtcagctgctgcagatagccctggctttgcagggccagcatccaggagagcgccgagatatagggcggcgtcagaaaggggatcaaaaacaggagatcccacagccggggcagcggcagcgaaaacataccgcgcaggatgccgagcggcaggccaatcattacgctgaccagcgccacgccggcggcgatccacagcgtaccgccgagcatcgccggcagctgaggatcggccagcagcgccgggatgccgccaaaggcgtccccgagcgaaccggcgctaaaatggggaaaaatcgcctgcagcagaataaacactaacggtaacgcgaccagcatcaccagggcggcaagggtcgcgccggaaaggaatgtttgtttcacaaccggttcctgaagctgagggtcctccggcggccagcgccggagaaacgggatcaattactgcgcgtacagctgactgaagcgggcgagcacggcgccccgctcgctgctgccctcgctggtggtgggtagcaccttcagcgcgtccagtagcggacgtttagccgccacgtcgcggcgggcgggcatcagccaggcgtcggcgaccttcgcctgaccttccggcgacagcacgtaatcgataaaggctttggcctcgccgggatgctggctggttttgaggatcatcatcgggcgcggggcaatcaccgttccgctggccgggaagatcaccttcagcgactcgccctgctgaatattgccgtaggagacataatccaccgcgccaaacaccgccgctttcgctccctgcatcaccggcgtcaccgcctgggcgttgggtccgctgactaccatgccgttctttttcagatcgtcaaacagttgccaggcctggtcgcccatgctgttttgcagcccgatcagcaaatccagcgacgcgccggagagcgccgggtcgggggttgtcaccttgtctttaaacgccggctgggtgagatcccgccactctttcggttccggggtgccgcttttactgttccagacaatacccagggcggagacgccctgggcgatatagtccgccgatttcaggttcgccggtacctggtcggcgttggcgctcgcaaaaggcaacaaccagccccgctggtgcagatcttcggcggtatcccacgaggcggagatcagcacatccgcctgcgggttggcctgctcggcctccagtcgggccatcactttgccggtggtggcctgaaaaacggtcaccttcaccccggtctgttgttcaaaaccgctggccaggcttttcgccagcgagccgggtccggcggtgtaaacggtcagcgcatgggcgctggagagcatcatggcggagagagccatcgcgagtaccactcctttcttaacggtcataacggtgttcatgcaacttcccctgaggttggcgtaacggcgcggacagcggccacgcggcccgcggataaatagacaacctggtcggctaacagctcggcttcatgtcggtcatgggtgacatacagggcggtgatgccgagctgtcgcagcaggcggctcatttcgccacacagcgattcgcgtagttcgctgtccaggttggagagcggttcatcaaacagcagcacccgcggcgcggcgacgatcgcccgcgccagcgccacccgctgctgctgaccgccggagaggcctgaaggcttacgttcggcaaagccattgaggcctacccgcgccagcgcctcgctgacccggcgctcgcgttcgctgcgggagacgccgcgcatgcgcagcggaaaggcgacgttctgcgccacgctcatatgcggccagagggcataatcctgaaaaaccatgccgatatcgcgctgctccgggggcaatccccatcctgcgcgggcgaccagcctgtcgccaaagcggatttcgccgctggccggcacgctcagcccggccagcagacgcagcagcgtgcttttgccgcagccggaagggcccagtagcgccacgatgcggccgggttcgatatgcaacgtgaagcggtcaagaatgggggtctctgcgaaggcgaaagagacctcctgcagggtgataggggtcagcgtgcgcatcatcgccctccctttcgggacagcgagaccagcccggcggtcgacatccgacggggcacgctcacctgggatagcatcaggggagccaacatattgtgatcctctttgggacttagtgctggcgactatagtcagacgagatgacgtattgattacattttcattgcggcttaacgtgttacctgccaaccgacccattattcaaggaacgcctatgagccgctttcgccacgttgaactgcagtacgccagccgcctgctcaaccacggcccaaccattttgatcaccagctacgatgccccgtccgaccggcgcaacgtaatggccgccgcctggtcaatgccggtggaattcgccccgccgcgggtggctatcgtggtggataaaagcacctggacgcgggagatcatcgagcgcaatggcaccttcggcattgtggttcccggcgtcgccgccgccagctggacctacgccgtcggcagcgtcagcggccgcgatgaggacaaattcaatgcctgggggatcccggtagtaaccggtccggagctggggctgccgctgatcgaggagaaatgtctggcatggatggagtgccggttgctgccggcgacggcggcccagacccagtacgacaccctgttcggggaggtggtctctgccgccgccgatgagcgcgcgttcgtcaccggacgctggcaattcgacgacgataagctcaataccctgcatcatctgggcaccggcaattttgtcgccagcggccgtcatgtgcgggcaaactccctcgacgaataagcgtgacttgccgcgggcggccggtttttcccctgcccggcctgcggcccccttttaacccggtgggcggcggcgatcggcgctgggggtcaggccaaatacttttttatacagggtggtaaagtggttgctgttggcgaagccgcacagataagccacttcggtgatggtcatctccgtttcgcgtaatttgacccgcgcggagaccagccgcagacgtttcagataattatccggggttaatccggtggcctctttaatatggcgaaacgcggtgcgggtggtgagatgaaattgctccgccagctgctgccagttatgttcttcgaaacagtgctcctgaagccaggtgagtaatttatgcagtttatagcgagtgctgctatattcggcttccgactcggctgtgagaatggtggtcaccagctggaaaaagagagactcccgtagcggggtattatccgccgccctcagcgccggggaaaatatcttttccaccagttcccggcaatagctgcgagtctccggcgccagccagccatagcaggcggcgcgctgcgcggataattgctgcagcaatccctccatctgctgtaaatagccaaaggccaccgccggattaattaagacattaatcagcttcagcgtccccagctcatcataataatgcacatcgccaggctggacgtaaaatacgtctccctgttggatatacagcgggcgaccattaataacgtgtaacccatgcccctcctcgacgatcaccagttcggcaaattcatggccatgctcctggctattatcctccgggtcactggcgtacatgccgagcttatcctggggatgggtgaaataatactcaacggtcagtgtcatcattacagcaaatcctgaacaacctatggcgcaggggcacgataatctattccggccctcggcacgcgcccgatgtgcggatttgtgatcgccagcgcccccacctcattattcctgccattttcactgacggtttggcattgccagagtggtagccgcgccggacgacggcctatgctgcgcctaacctaacggagaggacgcagtatgtcacaagcaattcaatacaattccagcgtggcgatgatccgtcatccgcgctttttacagcgtgcggccgacctgacgcccgcgctgcaacgcctgcgccagacgccgcaggccatcgtcgaggccgtcgctgaaccaggagcgctgaacggctggcgggggaataccgtccgcacgccggaacagttttatcagcaaccgctcaacgtcggcgacagcatcattattgattttggcagccattttgttggctacctgcagttcagctgccgcagcgtcggcagcccgcccgatgccccggcacatctgcacttcaccttcggcgagacgctgagcgaagtctgtgagccgttcagcgaataccatggatggctgagcagcagctggttgcagcagcaggatctgtggcttgacgtcctgcccgcccgggtcgctctgccacgtcgctattgcctgcgctacctgaaggtggaggtcaaagcgctgtcgcgcaagttccgtctgcagttcgatgagatcgctctggaaaccgtcacctctgccggcagcccgcacccggcggtcatcgccgatccgcagttgaaggccattgatgacgttgccgttcgtaccctgaaaaactgcatgcaggaggtgtttgaagatgggccgaaacgcgaccgtcggctgtggctgggcgacctgcgcctgcaggcgcaggtgaatgacgtgaccttcggccaccacgatctggtccgccgctgcctgtatctctttgccggccatacccgggaagatggcatggtttccgccaatgtctttgttcagccagaggtacgcgccgatgacacctttctgtttgattactcattgttttttgtcgacgtgctttataactacctgcaaagcaccggcgacacggaaaccgtcggtgagctgtggcccacggcgcggcggcaaatcgagctggcgctgacccgctgcgattctcaggggctggtgcgcgacagcgatgactggtgggtatttatcgactggcaggcggagctgaataaacaggcctcggcgcagggggtgctcatctactgtctgcagcgcgccctctggctggcgcagcgttttgaaccgcagcgggtacctgactacactgccacgctctggcagctgaaggaggccgccctccaccatctgtgggacaacgagcggcaggtgtttatcagcggcgccgtgcgtcaggtctcatgggcgtcgcagatctggctggtgctggcggaagttggcaccgccgggcagcgtcaggggctgatgcgccgcctgcagcagcagccgcccgccattgccatgaacaccccgtacctgcgtcatcatcacattgttgccctgctacagtccggcctgcgcgaggaggcggtggcggagatcaaagcctactggggggcgatggtcgcctacggcgccgacaccttctgggaaattttcgacccccaacatcctgacttttccccgtatggcagtaagcttatcaacagttactgccatgcgtggagctgtaccccggcctggtttattcgccagtacggactttaacaacaacgataagcgagtgatttatggcagaaacaacgtttaccctgtggcggcagcgccttggctatggcattgccgatctctcctgcaaccttgtgtggcagatgatctctctgtatctgatgttcttttacaccgacgtcatgggtctcccggcctattatgtcggcctgatgttcctggtcacccggctggtagacggcgtggccgacgtgctgatggggctggtgatcgacaataccaccacccgctgggggcgctgccgcccctggctgctgatcggcgccctgccttttggcctgctgtgtattctggccttttatgtgccggatttcggcaccaccggcaaactgctgtacgcctttgtcacctatctgtgtctgtcgttcctctacaccctggtgaatattccgttctgcgccatgctgccgtttttaaccagtgattccgcagaacgcaccacgctgtcggcggtgcgcattttgctgggctcccttggcgccaccatcgtcgccgtggctacgctgccgctggtcggcatgctaggcaaaggcaaccagcagcagggattcctctataccgcggtgatttttggcgtactggcggcctttttcctgctggtgagctttcgcaacgtcgaagaaaagatcacccttaccggggagcgcatgaccctgaaacgcgcctggattagtctgcgcgccaatcgtccgtggtgggtcttcgccagcaatatctttctgatgtggggtgcctttttctttcagaccggggccctggtgtacttcttccattattacgtcgggaataccgagctgacggcggttatcgccgggatctccaccttcgttcccctgctcggcaccctcaccgtcccgctgctggcccgacgcatgaaaaaacgtcatgtctatctggtggccagcgcggtcaatctgctcgggatggggattatgatggtgtctggcgcccacgttctgggactgatcgtcggggccgtgatcctctccctcggcgccggccaacgcacggctatctatttctcgatgcaggccgacccggtggattacggcgtgtggaaaaccgggattaataccgcagggatcctgacctcgataaacggttttctcggcaaggtggcgatggctggtgccggggctatcaccggcgtgctgctctcctccagcggctatatcgccaaccacacgcagagcgacagcgccctgttggccatcaaggcctgctatctatacattccggcgctattgatcctcgcctcgatgctgtggatgggccgcttctaccgcctcgacgatcagtatgagcagattcgtgccgaccttgatgccggacgcggcgcctcgccagccccggccccgaccgccggagaatcccccgccatgtaaggcgcccccgctgatttaacctctggataaattaaggatttttatgcgtatctctgtgattagcgcagcggtttgctgcgccctttttccgctcatcagcgtcagcgccgccggcttgagcgtggagcaacggctggcgcagctggaagcgcgcctcaatctcgctgaacagcaggccagcgaggccagccgccgcgcgcagcgggcagaacagcaaactgccgccgccgagcagcgcgccgcggcggcggagcagcaggtgcaggcgctcagccagcagaccacggctcgcgaacaaaaacagcaggccactaatcagcaactgagcgagcagctggcgaagcgcgccccggacgatgggtttacctttaacgcctacgcccgttccgggatgttagtcaacagccatggtaaaggcgcccgcggcgggccgggcgtctccccggccagttcgctcaacggcgatgcccatgtcggtcgtctcggtaacgaaaaagataattacgctgagctgagctttggcaaaaagctcaccttcaacgatggctcatgggcgcgcttcaagaccatgctcgccgacggggccaccaacccggatccgtgggttcaggataacgacagccaccatctgaacattcgtcagctgtacgtcgagatgggtaactttgccgaattcaccggtccgttaaaacgcgcctcaatttgggccggcaagcgcttcgatcgggataacttcgatatccactttaccgatagcgacatcatgttcctcggcggtaccggcggcgggatcaatgatgtcgactggggaagcggcctgcgcggcgactattcggtgtatgcacgtaacttcggcgaccttggcagcgataattacgcggataatgacatccagaatctgctgttcaccgccaaccatttttacggcaactggcaactgatgaccacggtgatgaccgcccagggcaacgatgacctgaaagataatacctcgaccaccgggagctatgccctgcgcagcgataacaccgccaaaaacggctactacgcgatgctggccctccacgacaaacagcagttctacggcctggcgccgggggtgtctgaaagcgccctgcaatacggcgtcgggctgggcgccgaagcgcgtcagccggggagcgatggcgatctgaccgagaacgcggcctccctgcgctttgcgtcgtatggcatcctgccgttggggaaaaactggcagctggcgccgtcggtgatagcccagcatagcgaagaccgctatcgcgacggcgaccgctacgactgggcgacgtttaacctgcgggtatcacaggggatctccgctcacttcgccctgctgtatgaggcctcgtggcagtatatggatctcaatccgaacgggcgcagctatcgctataatgacaacgtttatcagtatcaggcggtgcgcggtgatttctacaagctgaccttcgcccccacctttaaagtgggcgatgtgctggatatcaaggcgcggccggaaatccgcttctttgccacctggatgaactgggataaagcgctggatcgctacgcgataaatgacgatttcggcagcaaaggctttaccgctggcgggacatggaacttcggcgtgcagacggagatttggttttaatcaaacggcccgtccggctcaaatgccaggacgggttgatttaaatacacgctgttactttgtcactatgccagtgctgtatgaagtaatataaactcataaaataaaaaccataacaggctaaaaagataaaggttgtttttataattccaacaagtgactttcgttttttctcaataatgagaagatcgtgaaacctttcttgctgttgttctggtgttaaattatcaactattttattttttatatcatcgtgaatctttttaaacgttcgcttttcacctggaaagctaccgtttagaagaaacaaaaaaaataaagaaaagcataacgaatgctaatatccgaatactgggctcagttaccccccagcatccaagggtagcaataaacaaccagataccatgagtgtttgctcgtgctctaaacctatcaatatgagcgctgtatttcttgatttgtttcaaaatagaatcgttggtttccatacgtaatgcactcctttttaaaggccccggttacgaaagagggcaaactctgccatttttcttgcgaagaataatctttcaaacaaccttcaacaagttgataatcaatggattaccctgaagcaataaaagcagttttctggctgcaccggttgggtgacgtcgtttcgtttcccagcttttaaccaactcgtagctaacgccaacggccgctgcaaagtcctgctgttttaaacctgtggcttcacgtatcgctttcacgtcaatttcgctgaaggtatgaacgtgctgctccatcggcatttgttcacctttctcgatcctgaccatttcttctgcactcgccagcagatcggcaaacaattcgtctttcatacccacctcggttggctctctggcgcttaggatagatgaacatgctgtttctctcagtgcgtcgccggagaagcccctccccgggggcggcgcaaagcgccttgcccgggctacggaactgcagaccgctgagagcgcgtagcccggacaaatgcgcagcatcgcctccgagggtcgggttacatgctataacccggctgcttaatcaactgcgccatctgcggggcgatctcactgtcccacaccgcctgccacgcgtccggctcaacctgagtgagtgcgacgctgacggcgctctctttgctgttcagatggcggatcagcacctcagtgatgtcggcggccagcgcggttttttgttcatcagtcagttcacggggaaaacatttaatatcaacatgcggcatagcaaagactccttgtgatgagagccataacgctaccacagaatggccgttctggttggcatcgcgtgcgttaaatcagcttgttacggcgtagcgccgcggccagctccggtcgctgacagaccgcccgggcgatggcggcgaattttggcgcgtggtcgtcaaaccacgcctggcggggtccccagcggtacatcgccgcgatatagcaatccagcaacgttaccgacgcgcccagcgcccaaggcccggcggccagctgctgttcgaaccagagatagagatttttccggtactggcgacaattctccaccagctgctccgcggcggcgggcgcccagcgttccgggtaatcggcataggtaaaggtaggatagacattggccaccagccagaccagcaggcgctgaaactgcggacgctgtggcgtccccggcgcgggggccagatcgggacgctggtcgaggatcatcagcgcgatggcggcggtttcggtcatgatgctcccgtcggccagcctcagggtgggcacctggcacagcggattaatctgccgcagacgctcgcgcgccggaccgggctggtcaaagccctccacgtcaaccacctcgtagggaatatcggccagggagagcatcagctcgctaatcgtcgagccccatcccggcacgccataaacggttatcatggtcggcctccagggtaaagcctaagtgtaggcagaaatttgccgctcacccacccggcacaccatgccactgggggttagtaggttatccccggcgggttgaccaccgactgcgccaccgcttcgccctgctccccccaacgcgccagcacctgctgatattcaccgcgggtaatcgccccgtcgagggctgcctgcagggcatagaccagaccgttgccttttttggtggttgtcgccacccacgcttttttcggccccaggcccaccacccgggtctggccgttaagcgccgctttataggctgccaccgactgcgggccgaaaaagatatccgcccgtccggactggatatagagattgccggaggcatcatcggtcaggtagaccggctgggcctgcggccgtccggcggcgcggttgtcctcgttccagcccagcaggatccgctcctgattggtgccggacccgacgatcactttgcgccccgcgagatcggcgggtccgtttaccgcgacgatatcgctggtggatttcaccgagaaggccagggagtccacccggtaagtcgcaaaatcgaacttctctttgcgcttctcggtcaccgcgatattgatcagcgccacatcgtagcggccggaggcgatgcccagcggccagtcctcccacgcggtgggcaccagcctgagcttcaggccaaggcttccggccagcaggcgggctatatccgggtcgctaccgatccgcgtgcggttgtcgctggccagcagggccagcggcggcgaattgagcgccgagatcgccaccgttagcgtccccggctcgacgaagcgatagcccggcggaattttcgctatcgcctgcgggtcgcgggtgaccggcaatggctgctcattggcgcgcagatccagcgccgcgtgagcgctcatggcaaaagcgctgagaacaagggtcattagcgctctgttcatgacggcagcaccctggataaaaactgccgggtacgcggatgctgcggatggttgagcacctcgtcgctgctgccctgctcgacgatcctgccgtcgaccataaacaccacctggtcggccacctcgcgggcaaagccaatctcatgggtgaccaccaccagggtggtgcccgatcgcgccagcttcttgatgacatccagtacctcgcccaccagctcgggatccagcgccgaggtgggttcatcaaacaggatcacccgcgggttcagcgccagcgcccgggcaatggcgatacgctgctgctggccgccggagagatgccgcgaccaggcgtcggctttattgcgcagtccgacgacgtccagcagttcataggcgcgggcaatggcctctttgcgcgtgacctgctggtgggcgatcggcgcctctatcaggttctccagcaccgtcaggtgcggaaacagattaaagttctggaaaacgtagccgacgttgatccgctggcggaggatctccttctctttcatctcatacagcttgtcgcctttgcggcgatagccgatatagtcgccgtcaatctgaataaatccctcatcgacccgttcgaggtgatttatggtgcgcagcagcgtggacttgcccgagccggaagggccgaggatcaccgtcaccgtgcccggggggatctccagcgacacatcgtccagcgccttgtggcggccatagtatttgctgaccccggtgatagagatatggccattatgagagctgggcatgaacggcctcctgcggctgcgcttgacgtgcgggttgattcagacggctgctgcgggcgctgtttaccgccgagcggcgctcgctgcgcgccaggccccgttccaccagatactgaatggcggagaggacgctggtgatcgccagataccaggcggcgccgaccatcaacagcgggatcacctcctgggtacggttgtagatcatctggatggtgtagaacagctccggcatcgccaggacatacaccatcgccgttcccttggccagactgatgatctcgttgaagccggatggcaggatggtgcgcagcgcctgcggcagaataatgcgcagcgtgcgccgccaggcgggtagccccagcgcggcggcggcttcatactgcccgtggtcgacgccgagaaagccgccgcgaataatctccgcggtataggcgctctgcaccagggtcaggcccaccaccgccgtggagaattgccccagcacgttaatggtctgatagctggcccaggtcacgccggtaaacgggatccccagcgacagggtgtcgtagagataggaaaagttatagagaatgatcagcaccacaatcagcggcagcgagcgaaacagccagatatagccccaggcgagactgctgagcagccacgatgaggacaaacgggccagcgccagcaggccgccgaagatcacgcttagcaccgtgccgagcagggtcaggagcagggtttgccccagcccctcgaggatcaccgggtcgaagaaccagcgggcgaagacgccccactcccagcgcgggttaaaggccaccgactggatcaccaccgccagcaccagcagggcgaccagagccccgaccacccgcagcggatagcgcgccggcaccactttgatcgtttcagatgaatgcataatgcctcctcaggcgctgtggctgtaggcgctcaccgccagcgctttagtgaaccgcagccggccatcgtacggcggctgactgtactcttccgggtctcgcgtgaggtcaaactgcgcctcatacccctggctgagatagagctttaccgcctccggctgacggaaaccggtggtcaggtagatatggctgtacccggccagcaccgcccgtcgctccagctcctggaccaccttcgccgccagcccctgctgtcgcagacggcggtgtgtccagatacgtttgatctctgcggtgtggcgatccttcggcttatacgcgccggtggcgataatttcaccctcacgctcaaggacaataaacagcccctgcggcggcaaataccactcacttaactccacttccgcatcgcgggaaaaatagtcgccgtagcgggcggcatattctgcaaacagcccgctaataatcggctgcagctccggagcctccggagaaatatcgcggaatgcttcgctcatcgcgcctcctgtcagtcgcccagtccgggcggattgatttccgattgcggaatgctttccaccccttcgccccagcggttaagcactttggcgtagtccccgctggcgatagccccgttcagcgccgcctggacggcattcaccagcccgctgtcttttttcagcgttaccgcgatatgcgccgctttcggccagccgccatcgacgctgcccaccagtttggttttgccggtcagcgccgccttccacgcgccaatcacgttggggccgaagaaggcgtcggctcgtccagtctgcagggccagcgtctgggcggcatcatccttggtgtagaccgggataaacggcttcagccccttcttgacgttctccgcgttccacgccagcaggatcgcctcctggttggtgccggagccgacaataatctttagcccggcgatatcttccgctttgtcaatcttgctcagcgggctggtgcttttgacgtagaagcccagcgagtctttgcggtaggtggcgaaatcgaacttctctttccgctctttggtgacggtaatattgctgatcgcggcatcatatttgccggaggtgacccccagcggccagtcttcccatgaagtgggaaccacgtttacttccagcccgaggctctccgccaccagccgggcgatatccgcctcgctgccgagcagggttttgttgtcatcggcaaagaccgtcagcggcggagagttcagggccgccaccgcgacggtgaatttccccggcaccgccagatgcagatcttgcggcaacagggcaatggcctgcggatttttcgctgtgtgaatcggcgttttgttggcctccaggctcactccggtgccattgatcttgacgtcctgaccccacgatgaggcgctaaatgccaacgcgacggccagcaagagtgttgttttctgcatagcgtgattctcttttattatttttggaattgattagcgggtagcgccagacccagactttcccgcagggtggtgcccggatagtcgcgacggaacagtccgcgcgcctgtaacagcggaaccacctcatccacaaagcgcgggaaggtttccggcgtgccgccctgaataatgaagccgtccgccgcgtgctgctcgaaccacagttgcaggccatcagcgacatcgctggcggtgccggtaaagcgcggacgcgggctggctgcctccagagccacctggcgcagggttaagccccgctcgcgggcgtgacgtttaatctcgtcggtggtactgcggaagctgttttgtccgaggtcgccaatatccgggaacggttcatcaagcgggtactgcgaaaagtcatggtgttcgaaatagcgcccgagataattcagcgcatcctcgatggagaccaacgccgcggtggtctggtactgccgctccgcgtcctcggcgtcatccccgacgatgacgctgacgccctggaaaatatgcagttggtccggactgcgctgatatgcggcgagttggcttttgacatcccgataaaatgcctgcgcctcggccagcgagtcctgatgggtaaaaatggcatcggcgtggcgtgcggctaattttttgccgtcatccgacgcgccggcctggaaaataatcggtcggccctgcggcgtgcgggcaatattcagcggcccggcgactttaaagaaatcgccgtggtggtcgagcgtatgcagtttatttttatcaaagaactgaccagtctccttattgcgcacaaaggcatcttcttcccatgaatcccataagcctttcaccacctgcaggtattcatcggcaatgcgatagcgcagcgcatgatccggatgttgggcccgggagaagtttttcgccgacccctccagcggggaagtgaccacgttccaccccgcccgtccctggcttaaatggtcaaggctggcgaactggcgggcggtggtaaacggctcgctgtacgaagtcgataaggtccccaccagccccagtcgccgggtgatcgcggccagcgcggaaagtaccgttaagggttcgaagcgatttaaaaaatggggaatcgatttttcgttaatatataaaccgtcggcgacaaaaataaaatccagcttccccgcttctgcttttagcgccgtctgggtgacgaaatcaaaattaatactggcgtccgcctgggccgccggatgacgccaggcggacatatttcccgatgcgccatgcaatatggttcccagacgcaattgtcgattttcagacatagctaccccttcccctgtcattcgttaaatgtgttgtaacgcttcttccgcgagacgggcgaaatagtgcgccgcgggcgcaatcagccgttcatccggattaaatgccggatggtgcaaaccatattcgctggcgctgccgatgctgacgaacgccccgggaatatgctgaagatagaccgcaaaatcttcgccaccgagatgcagatcggcatggtgggtgcgatacccggcctgggctgccacctcgctggcgaaatcggcccagcgggcgtcgttgaccagcgccgtcgggccggcgtaccagaagacgtcaatctgcgcgccaaaggcgctggcgaaaccggcggcaatctcgctgacccgggccttgacccgctgctgcacttcactgctgtgggtgcgcagcgtcccctccagctcgacgctctccggcagcacgttccaggtattgcctccctggatccgcgtcacgctgagcaccaccgagtcgagggtgttcacttcccggctggccacgctctgcagcaccgtcaccagctggctggccagcaggatcgcatcctttccttcatgtgggcgggcggcatgcgcccccttcccggtcactttcaagacgaagcggtcgacgttggcgtagaacgcgccgccgcgggtggcaaattcgcccaccggcaggccgggctcattgtgcatgccgaagatcgccgacacctcctccagcgccccggcgcggatcagggttttcgcgccgccaaaattttcctccgccggctgaaacaggatccgcacccgccccgggagttccgcttcccgctccttcagcagcagcgccgcccccagcatcacgctggtgtgaatatcgtggccgcaggcatgcattaccccttgattctgcgagcggtaaggcagaccggtcgcctcctcgatgggcaacgcgtcgatgtccgcccgcagggcaatcaccttgtcgccgctgccgacttcggcgaccagcccggttttcagatcgtagggcagcagggtcagcccgccgctctgcagccagtcgcggatccgcgcggtggtggccacctcctgcagtgagagctccgggttctggtgcagctcgcgccgccagctaatcagttgttgttcaaaggacattcagcacctccttgccgtagtgagcctgcgccagcaggcgcagggagtgcaggcgcgctggcccgtcgctaatgggggtatcaatgatgagttcatccaactgttcttccgcctgcagcgcgtcaagccgggctttaacctgttcgggagtaccggagatcagcgaagattcacggcgggcaatgcgcgtcggtcggctgccggcctggcgggcaaaagcgacggcctgcgcctcactgccgacggtcacccgctggccgttctccagctcgacgccccacacctcgacctgctgcgccagcgcggcggcggtggccggatcgtcagcgaccaccacctggacggcgaccatcgcctcacgcgggctgagctcgcgccagcggttgaacacggcacggcgcagcgcgctgtcgccattgagatgggcggcaaagacaaagttccagtcaaggcgggcggccagttcagcactctccaggctggcgccgagcagaaaaccatctgcccggcgcggcgggatcggcgtggcgcgtaggctctcctctcccccgggctcagtcagcgacagccagttatccagctgcgccagctgatcggcaaaggtccctttctcctcttgatgcaggccctgctgcagggcgcgggtggagagcggcaggccgccaggcgccttgccgaccccgagatcgatgcggcccggcgcgagggcggccagcaggttaaagttttccgcgaccttataggggctatagtgctggagcatgacgccgccggacccaagacggatccgccgggtgtggcccagcagccaggcgataaccagctccggcgaggggctcgccagctgatcggtattgtggtgttcggcgacccagaagcggtggtagccccaggcttcggcgtgttgcgccagcgttaatgtacgcgccagcgcctgcgcggcggtttccccggcggcaagcggacttttatccagaatactgattcgataagacatttcgcaggctcatatgaaagtacgtgcctgcattattaaaatctctgctaactattgagaaacaattaattcacatgtgtactgctgaaaattagatatgcccggctgaacgctgcgcttccagctcgcggagcagcgcctcggcctgccgcggattgcgcacccggacgaagcgaatatgacgatattgcggatcctgcatatcggccagatagcgtcggcgatgctgccgccaggttttcagcgtccagaggatgatggattcccggctgcagaacgaacggcgaaaactctcgcagttgcccgtgcccggccacagctcctgatgtcgccacgcccggctcgccgcccgccataccgcctggcgcagcgtgcgccagaaaccataatctacccagatcaccaaatccaccgcacgccatttaacgctgcggctgcgattgtaattgccatccagcacccagcccggcgtggccgtcgcggcggcaatggcggcgaaaaatgcctcatccggcgcgccctgccagttcggccgccagtacaggcgatcgagctcgatccagggtaattccagcctgtgcgccaggcgccgggccaaagtggatttgcctgagccgctggtgccgaccacgttgatattcatctctgtttctccccggttaccagactctgcctggcgatactcttgaatcatctttcgggctgccgtccccccggtcatgccgcgccagcgaatgtcggttcacttggcgctggcgttttttgggccgactacaatacctgccctgcacagaggaataaatcatccgccataaccattctgctccactgcgtccggccatcaggctggcacaatcctcaggccgggcatacactctgcgtacctgtgagcagtattcatcaatccggaaagattatgctaaaagagaacgtaaacgatctgctctcctttatggtggtggcgcgtgaacgcagctttacccgcgcggcggcccagcttggcgtgtcgcagtcggcgctcagccatgccatgcgccatctcgaaacgcggctcgatgtccggctgttaacccgcaccacccgcagcgtggtgccgaccgaagcgggcgagcgactgattcagcgcctcggtccgcatctggaagagatcgagcaggccctggctgcattgcgcgacacccgagaacgcccggcgggcaacctgcgcattaccgccggggagcatgccgccagcgcagtactctggccggcgctaaagccatttatgctgcaatatcctgatattaacatcgaaatcactgttgataatgggctcacggatatcgtgggtgaccgcttcgacgccggggtgcgtctcggcgaacaagtggcaaaagacatgattgccgtgcgcatcgccccggatatgcggatggcggtggtgggttcgccggcctatctgcagcgggccggtacgccgcaaacgccctgggatcttgcccaacatcgctgcatcaatctgcgcctgccgacacgagggggactttacgcctgggaatttgcccgcgatggccgggagattcaggtgcgggtggagggacagctgctcctcaacagcctgccgcagcgcatcgacgcggcggaggcgggcctcgggctggcctacgtgccggatgactgcgtggcggaggccttagccagcggccggctggtgcgggtgctggcggagtggacccccgccttccccggctaccatctctattaccccagccggcgccagcataccagcgctttcacgctgttactggaaactctgcgacgctgatctcattgataaatctgtcaaatgctctcggtaaatgttttaggtgcgtaactattaggttacgtgtaggattcagcgccatgtctgagcttatctcctacgtcagaatgatgagaaagccagcataatgtgccagccgtcctccattccggctgcaaacatgggcattgacaggaaactgatacatcaatgaatacgaaacacgaaaatgcagcggagcatcatgctgcaaaacgccactggcttaactcacatgaagcgggttatcacaaagcgatgggcaaccgtcaggtacagatgatcgccatcggcggcgccatcggtaccggtttgttcctcggcgccggggcacgtttacaaatggcagggccagcgctcgccctggtctatctggtctgcggcatcttctccttctttattcttcgcgccctcggcgaactggtcctccaccgcccctcgagcggcagcttcgtctcttatgccagggagttcctcggtgaaaaagccgcttacgtggccggctggatgtacttcgttaactgggcgatgaccgggattgtcgatatcaccgccgtggcgctgtatatgcactactggggcgcgtttggcgatgtgccgcagtgggtcttcgccctcggcgcgctggctatcgtcggcaccatgaatatgatcggcgtgaagtggttcgccgaaatggagttctggttcgcgctggtaaaggtgctggcgatcgtcgcctttctcgtggtcggcaccattttcctcggctccggtaagccgctggacggcaatgccaccggcttccatctgatcaccgataacggcggcttcttcccgcacggcctcctgccggcgctggtgctggtgcagggggtggtcttcgccttcgcctccatcgagctggtggggaccgcggccggagagtgtaaggatccggagacaatggtgccgaaggccatcaacagcgtgatctggcgtatcggtctgttctatgtcggttcggtagtgttgctggtgctgcttctgccgtggaacgcctaccaggccggacagagcccgttcgttaccttcttctcaaagctgggcgtgccatatatcggcagcgtgatgaacatcgtggtgttaaccgcggccctctccagccttaactcgggtctctacagtaccgggcgtattctgcgctcgatgtcgatgggaggctccgcgccgaagtttatgtcgaagatgagccgtcaccacgtcccttacgccgggatcctggcgacgctgggggtatatgtagtcggggttttcctcaactatctggtgccatctcaggtatttgagatcgtactcaacgtcgcctcgctggggatcattgcctcctggggctttatcgtggtgtgtcagatgcgtctgcgcaaagcgatcaaggaagggaaagcggcaaaggtcagcttcagaatgccgggggcgccgttcacctcctggctgacgctgctgttcctgttcagcgtgctggtgctgatggccttcgattatccgaacggtacctacaccataggatcaattccgctgctggcggtattgctggtggctggctggtttggtgtgcgtaaacgcgtgcatgagattcacagcacggcgccgacgctgaggaagtaactggcaggactcccggtttgtccatcgcgggcaaaccgggaggtcagaacttaattatcttcaaccagctgcgacacatcgctgctgttaatttcccgcttattacctgactcatcgatatagctggtcatccccgtttctttatccagctgcggcttgccgtgggtaacgatagtttgaccgctcttcgtggtcataacgtagtttgacgaacaacctgccagcagcgccagcatcgcgccggcgcaaatcaccatgaatggctttttcattttatctccactgattaccactgcccgcacgtggcgggaaagggttaagtgtataaccatctggtttgtcaggccaataggcgtttgtaacagagggtgagtcgccgggcctggcccggcggcatgcggagcgcgaccaccgttttccggtttcgtcgcgctgaggtcttagagggcgatgcggatcacatcgtccggcgcggtggcttctttctcacggctggaagcctgtttcacgctaacgtacagcgttttgccgtcctcggagagcgccaggctgttggggtgagtcggcgttttaaaggtcttcaccaccttgtagctcttgccgtcgataacgctgacttccccggccttacgatgcgtcacataggcttcgttgcgcgccgggttaaacagcaccgccagcgactccggcgcggcgattttctccagcaccttgccgtcgcgggtatcgaccaccagcacttccggctgcttgctgtcggtaataaaggcacgatggccggcggtatcgagactcaggttaagatagaaatgcgctttgccgtcatcctgcaattttttgcgcgacgcaatcgtgttgctctcgctgtcgatggtcagcagttcgccatcggcgttggtggtatacagacgcttagcctgcggatcgatcgccagacccgtcgccattgccccggtgccggtaatggtcgttttcagcttcagggtcgcgccatctaccacccaaatcacgctctctttgcccagaccggtaatgtagaccgtgttggtctgctcattgaccgccagctcgcgcggctgcagcgggcgcacggtttcgctgcgctgacgctcgtccagcaccaggcgccccttcacggcgccggttttggcgtcaatagcggtgacagtgctgtcgacggtattgccaaaccacagcgtgccggtggcatggttgatagtggcgccgaacggcttcagatcgttgtgaataatctgcgtcacgtcgagggtggtggggtcaagacggtaaaccaccccgcctttgtccagcgaacgactctgtgatgtggcgacccacagcgcattctcctgctggctgtaggccatttcgtaggccccttttccgacggccttgcgcagcatctcttccgcggcgtgggcgctaaagctgcctgccagcagcagagaagtgacgagcagtgaatggcgcagacgcggcgcggcaaaatgacgtaatgacatgacgactccctttgataaaccagtatgtgctgacccgacatcgcttccggcggtaaagtcctggctttacccttatttttgaatgcgaatagtaatcattatttatatcaaagtggagcgttaattgttgttgtgcggtaaattcatgtctggcgagcactatccgttaaccagtagcagttaataattttcaaatattttacaaacgaggtaacatatatacatatgttccatttggttcgttttgagtattatcgatgaaaatcctgtccgtgcgtctcgccgccctcccggccctgctcttgccgctcattgccgcagcccaggccgctgatgaacaaaccatggtggtgaccgccgcgccaaccacggtttctgaactggatacccccgccgccgtcagcgtggtgaatggggatgagatgcgccaggccgcgccgcgcgtcaatctctctgaatcgctgggcgccgtgccgggcctgcaggtgcagaaccggcaaaactatgcccaggatctgcagctgtcgattcgcggctttggctcgcgctcaacctatggcgtgcgcggactgcgcatctatgtggatggcattccggccaccatgcccgacggccaggggcagacctcaaatattgatatcggcagcgttgacaccattgaggtgctgcgcggccccttctctgccctgtacggtaactcgtccggcggggtgatcaacgtcaccagccagaccggcgcccagccgcccaccgtggaagccagcagctactatggcagcttcggcacctggcactacgggatgaaagccactggcgccgttggcgacggcagccacgcaggcgatgtggattacacggtctcaaccaatcgcttcaccacccatggctatcgcgatcacagcggcgcgcgcaaaaatctggcgaacgcccggctgggggtgcgtatcaacgacgtcagtaagctgactctgctgctgaatagcgtggatatcaaagccaatgacgccggtggcctgaccgccgatgaatggcgcgataacccgcgccagtcaccgcgcggcgaccagtataatacccgcaagaatacccgacagacccaggccggcctgcgctatgagcgccagctcagtgcccaggacgatctcagcgttatgatgtacgctggagaacgtgaaaccacgcagttccagtcgatcccccgcgcgccgcagctgaagccgagccatgccggcggggtgatcgaccttacccgtcactaccaggggatcgatacccggctgacccatcgcggagagctgctggtgcccgtcacgctcaccgccggtctcgactacgagaacatgagcgagcggcgcaaagggtatgaaaactttgtgatggtcaacggcgcgccgcagtatggcgaacagggcgcgctgcgccgtaacgaacgcaacctgatgtggaacgtcgacccctacctgcagacccagtggcagctcactgacaaactctcgctcgatgccggggttcgctacagctcggtatggttcgactcgaacgactactacatcaccccaggcaatggcgatgacagcggtgatgccagctatcacaaatggctgcccgcgggctcgctgaaatatgccctgaccgacgcgtggaacgtctatctttccgccggccgcggcttcgagacgccaaccattaacgaactctcctaccgctccgataaccagagcggcctcaacttcggcctgaaaccctccaccaacgacacggtggagatcggcagcaagacgcggatcggcaatgggctgttcaccgccgccctgttccagaccaataccgataatgagattgtggtcgacagcagcagcggcgggcgcaccagttataaaaacgccggcaagacccgccgtcaggggatggagctggggctggatcagcagtttggcgagagctggcgtctgaaggcggcctggacctggctggacgcgacctatcgcactaacgtctgcgacgacgccagctgcaatggcaatcgcattccggggatcgcgcgcaatatgggctacgcctcctttggctatcagccggagcaaggttggtacgccgggagcgatattcgctatatgagcgatatcatggccaatgacgaaaacaccgccaaagcgccctcctggacggtggttggcctgacgactggctataaatggagctacggcaggatggatatggatctgttcggtcgcatcgacaacctgttcgaccgggagtacgtcgggtctgtcatcgttaacgagtctaacggacgttactacgagcctgccccgggacgtaactacggcatcggcctgaacctcgcctggcgcttcgaataacgcgccccttccccgccgatgcctctcgcgatcggcgggcgaagcgcttttccttaccgtctattccaccgccaggcgtacacccgccaaccaaccgcgcttgacactccacccccttcgtagtcatatagtaaccacataatcaccatggttactatttatattgatcggcacttttatcagccagggagggataaatggataatgtcgtttatgcggactgcgtattgattaacggcaaggtcgccacggtggacgcacattttagttttaagcgcgccatcgccgtgaagcagggatggattattaacgttggtgaagaccaggagattcagcagcatattggtccccagacgcaggtcattgaccttggcggcaaactcattttacccgccgcgcatgactcacatatccatatcggctggctcgctgacagctggcattgcctgaactgccaggacgtgcgttccctggcagtactgcgggaaagactgcgcgaccaggcagcccgcactcccgccggggcatggattcgtgtctgcggtctggatccaaacgcaatcaaggagtgcgcggccgagcagcgctctctgacgcgctgggatattgacgacgtcacggccgatcatcccaccctgctcgccctgtgggacggtcactcctgcatcgtcaacagccgggcgcaggccctctccggtcttgacgccagcacccctgatcccctcggcggacatctggggcgaacggccagtggcgaactggacggcaattttatcgacctgcccgccctgcatctcgcatccggcacgatgccccgtctgaccgtagcggccctcaaagagaaccttatggcagcccagcgcctaatgaacagcgaagggtatgccagctacacggaaggcgccatgggtccgggggaaaacacgcgcgaggtgggcgccgcgggggatcgcgccatcgccgcctaccgtgaactgcaggatgaaggaaaactcaccgcccgggtatccatcgccttttactccgccgagcggggcgttcagtcctgcgccaccctgaagcgcgatctggatagctttgatttctcccagttcaccgaccgggactggctggactgtcggaccataaaactgttctgcgatggcgttcccacatcgcacacagcgtggatgaatcaggattacgccgaccggccgggatatcgcggacgctcggtgtttggtggccccgaggcgaccgaggaagcacaagttgaggcgctacagcagatgattctgctggctcaccagcgcggttttcaggtggcagtccatgcggtcggcgataaggcggtaaaagtcacgattaacagcttcgtgcaggcgattcagcgctatccgggggagagccgacggcattatgtgctgcacggctcaatgggcgatcggcaagatttcgtgatggcggcaaaatacggcattctgctttccgaacaaccctcacccggcggcccggcatatgactatgaacagcgcgcccgctactgtggcatcaagggggaaatctgcaaagggctacgggatatcatcgaccttggggtcatcgtcgccggcgggtcagatggcattatggcgctggtgaactggcgcaaaatggttcaggcagcggtcacccgcaaatcatcttccagcggcaacgttattcgcccggaactggcaattagcgtggcggacggcgtgcggatgtacaccatcaatgccgcctatcaggaagggaaagaagcggtacgcggatcgatagaggtcggcaaagtcgctgattttcaggtgctggaccgcgatatcttcgccgtagcccatgaggagattggcgccagccgcgtggtgatgaccatggttggcggaaacgtcgtctttcaagactaaccgcgctcacccggctcaggtcgccgggcgggcagcgtgctgcatcagcggaaggcgtctgcccgccagagcatcgcgcttccgctacaggagcgaattaaagcagatttcgcagggataactcgaaaatgatcttttccgcctggcaggagaaggcgatggagaggtcgagtttcaccgcgtcgccagcggcgacgatggtgtaatcgacctgcggcggttcactggccggcgctgcggcggcagcacgttcgcgcacggcggctacggtggattccgcttcttcgcggtttgggaacaccttctcggcccggtagacgcagtcctcgttatcaatgatcgtcccgacatcaatggcgcagcctttggtgctgcatttatctactacatctttcatcgtaataacctcttgagttttcttaaggataagaacccgcccaccgaaaagcaaaccattaatatccgtaaggattagcaatttttctattatatcgcgtcgcgccgggcgccatcttgcgccaccgcaaaacgtggcaccatgtttacggacggtcgcgtaacgatacgcgttgcctcgcagcaatcgtggtctccatcacactattctgcacaccatctcgtctgccccgactcgcagcgttagtctggtcacagaacatcgccaacaaggagctgctatggcactgccgattatgattgattgcgatccgggacatgatgacgcgatcgccctggtcctcgccctcgcctcgccggagctggaggtgaaagccgtcaccgcttccgcgggcaaccagaccccggagaagaccctgcgcaacgtgctgcgtatgttgacgctgctgaaccggccggacattccggttgccggcggcgcgtggaagccgttgatgcgcgatctgatcatcgccgataacgtgcacggcgagagcggactggatggcccgagcctgcctgagccggcctttgcgccgcagaactgcaccgccgtcgagctgatggctagcgtgctgcgggaaagccaggagtcggtgaccctggtggccaccgggccgcagactaacgtggcgttgctgctcgccagccatccggagctgcacgcgaagatcgcccgcatcgtgatcatggggggcgccatggggctgggcaactggcagccggcggcggagtttaatatctacgttgatccgcaggccgcggaaatggtctttcagtcggggatcccggtggtcatggcggggctggatgttacgcatcgggcgcaaatccttcccgccgatatcgagcgattccgccagattggcaacccggtgtcgaccatcgtcgccgaactgctcgacttctttatggcctaccacaaagatgaaaagtggggcttcgacggcgcgccgctgcacgatccctgcaccatcgcctggctcctcaagccggagatctttaccacgatcgaacgctgggttggcgtagaaacggaaggcaaatatacccaggggatgacggtggtcgattactaccatctgaccggcaatcggcccaataccaccctgatgctggatgtggaccgcgaagcctttgtcgatctgctcgcccagcggttagccttctacgcctgacctctatgccaggcccctttaccctggcggaaaaaggggcctgttcagtcgaagcccgccaggctagtcgtccgccgcgacgcggatcactaccttaccgaagttctcgccttttaacagaccgatcagcgcctgcggtgcctggtccagaccgtcgatcagctgttcgcgatatttaattttcccctcctgcacccagcgccccatctgctgctggaattcggcgatccgatgcccgtaatcctggccgataataaagccctgcatccggatgcgctttttgaggatggtcgccatcagcagcggcagacgatctggcccgtccggcagcccggtggcgttatagccgctcaccagcccgcagacgggtacccgcgctgcggtattcaacagcggcagcaccgcgtcaaaaaccttgccgccgacgttttcataataaacgtcaataccctgcgggcaggccttggccagctgttcggcaaaatcatccgcacgatggtcaaggcagagatcaaagcctaacgtctcaaccgcatagcggcatttttccgcgccgccagcgatgccgacggtgcggcagcccttaattttgccgatctgtccaaccgtggcgccaaccggcccggtcgccgcggcgaccaccagcgtttcgcccgcctttggctggccgatttccagcaaacccatgtaggcggtgaagccgggcatccccagaactcccagcgaccaggacgggtgttgcggattgtcacccagcttcaccagtccgctgccgtcggagagttcataatcctgccagccgctgtagcccagcacccagtcgccgggttgataatcggcatgatttgagctgaccacgcgactcacggtccctcccaccatcaccgcgccaatggccaccggcggcgaataggacggcgcgtcgctcatgcgcccgcgcatatacgggtcgagcgataaataaacggtacgcagcagcacttgacccgggcctggcgtcggcacttcgctctcttccaggcggaaattctctgccgtcggttcaccatggggacgggaagccagcacccagcggcgatggcgttgcggttgatctgtcatagcaaactcctcttgttagcagactgtactgaggctagctgctttatgcgtattatgctttaacattaagagccggatggcgattgattaaggcgaactaccagatagacgcaggtctctgcggattcattaataaagcgacaatcgttgggcgggccaagctccagacaatcccccgcctgcatctcatggcgggtattgccttcgacaaacaccagctcgccctgttgcagccagattagctggcgggcaagcgcataggacgcggcgggcatcggcacatcgctaccgggcggcagctcaatctgcaccagatcgatcggcaaatcgctgcgcggcgaaacgtggcggcggagatagtggctttgcgggtcgcgccataccggctggctggcaaagcgcagcagcttgccctcctgcatttccgcgcgggcgatcagggtcgacatactgatgccgaaggcgccggaaaggcggccaagcatcgaggcggtcgggctgctttcgccgcgctcgattttatggatcatcgcccgtgaggcgccggcccgttcggcgaggtcgttcagcgaccagccgcgggactcgcgctcgatgcggatgcgcgcgctgatgcgctgattgaggttgtcttctatagtattcataacgtaacactatagtgtgcgcccccccattacacaaccatccaccgagacgtgttattcccgggttagccgttaaaattatgctgaaaacggatgacagcgtggcgttcattattgtaataatattgtactactatagtgtacgaaaaattgaggtttgctatgtccattcgccctgccattaaagacgactgcgcggcgatcgccgagatctataaccatgccgtcgtccataccgccgccatctggaatgataaaactgtggataccgacaaccgcatcgcctggtttgaagcccgccagctggctggatttccggtactggtgagcgaggaagacggcgtcattaccggttattcctcgtttggcgactggcgggcgtttgacggctttcgccataccgtggagcattcggtgtacgttcatcccgaacatcaggggaaagggctgggccgcaagctgctggtcgccttgatcgccgaagcgcgacggctgaataaacatgtgatggtcgccggcatcgagtcgcagaatcacgcttcgctgcatctgcatgaaacgctgggctttatcaccaccgggcagatgccgcaggtgggcaccaaatttggccgctggctggatctgacctttatgcagctgcagctggatgcgcgtcaggacccggacggcaaagcatgaacgcgtcgctcactctcgcctgcctgatcgccgccggcgttggcctggtagtgcagaacactctgatggtgcgcatcacccagtcggcgtcgacgatccttatcgctatgctgctcaattcgctggtcgggatcgttatcttcgtgacgatgttactgctgcgccagggcgtcgccggctttcaggagctggccctgagcgtgaagtggtggacgctgatccccggcctgctggggtcctttttcgtcttcgccagcatcagcggttatcaaaacgttggcgcggcgacgaccattgcggtactggtggccagccagctggtgggcgggttgatcatggatttagttcgcgcccacggcgtgccggtgcgggcgctgatcggaccgttatgcggggcggtgatgctggtggtgggcgcctggctggtggccagacgccagttctgagcgcatcttcagaggatcgcgccgcctttggtcaactgctcgcggcgcgcgtcctgctcttcctgatgctgtcgcccatgatgggcgatggcggtgcgcagacgctgctgttggatatagcgttcctcacgactgagttgcgcatcatcactcagggcgattagcagctcattcatatgcgcgataacgccctcggccagggcgtcatcgactttgacgataacctcatccagatgtgccatcctgttctcctttcgcttaattcagcttcgctttggaaaaatcgctccccatcatgctgacggtgtagccgctgacgttgctgcgcgtcgcatagaaggttttcccggtcgccagggtgatccatggcgcctgctgataaaagatctcctgcgcctgttcgtagagtttggcccgcgcctgcggatcgctcaccaacagcgctttctttaccagcgcgtcataggatttgtcacaccagcgggcggcgttggagccggtctggatattatcacagctgagcaatgtgccagcaaagttgtccggatcgccgttgtccgacatccagccatacagggcgctgtcgtgctcccctttacgcataccggcaaggtattcgccccattcatagctgacaattttggctttcacccccactttcgcccagtcgttttggatcatttcggcaatgcgttttgagtttgggttgtaggggcgctggaccggcattgaccacagggtcacttccgcgccttgctccagacccgcctgcttgagcagcgctttggctttctgcggatcgtagtcatagtccgggagatctttcttatacccgagcatcgtcgacgggatcggtgatttcgccacgctgccggaatcgaggaataccgccttgacgatcgcctgcttgtcggtagcgtagtttaacgcctggcgcaccagcacattatcaaacggttttttctcggtgttaaacgccagatagccgacgttcagcgcctcaaccgcatgcagcgccagatctttattgcccttaatcaccgggaactgtaccggcgacggcgcgggaataatctggcactcgttggtctgcagtttcgccagacgggtctcgacgttcggcgtaatggagaagattaagtgcttggtcggtacctcgccttcccagtagtggggattggcaatatagcggatttgcgagtccactttatactgctgcagcgcatacggcccggtaccgacaggccagttatcaacgttttccggcgttcctttcttcagcatcgcctcaccatactctgccgacagaatagaggcgaagtccatgccccagtcggcaagaaacgctgcgttcggctcgttgagctcgaactggacatggtaatcatccacctttttcaccgatttaatcagcttatcgaggcccacgtcgtggaagtattcatagttcccctgcgacaccttgtgataaggatgctgaggatccatctggcgcagcacggagaacaggacgtcgtcggcgttaaaatcgcgggtcggtttgaagaatttgttgctgttgaacttcaccccctgacgcagagtaaaggtccaggttttgccatcctcagagacgtgccactcggtggccagcgacgggatcggcgtatttttcaccgggtcaaagctcaccagacggttatacagtacctgcgagctggcgacgaacgacggaccggagctggcgatctgcggattgaaggactccggagaggcttctgagcagtagaccagagtgtcattgcctgcggcccaggcggcgccggccggcagcagtgcgctcagcagcagcgccagcgtggttttccctgtagacatggttataagtcctgattattgattataagaacagtaataacagcacagccgcctgacggcggcaaataatcaatggctatcaccttatgcaaaacgcgtggaatttgctggtttaatcgacgttgcgctgctttttacgccagagggcttcgggatgatgtgagccacacaaaattcctgcaaaaaaatgtgcgataaccgcccggctcacgcttcccgtcagtgccgcccggtacactgggggaaccgcagaacaagaggtttccaccatgacaatcacctgcaatctgtacattaacggccagtggcacgatgccgaaggccgccgcacctttacccgacgccacccggcccacgatgaggcagcctcggtggccgctgccgccagcctcgccgacggcaaacgctgcgtcgaagccgcggcctgcgcctttccgctgtggcgcgatactgcgccggcggaacgacgtcgcttactgctcgaggcggcggaacagatgctgttgcgggaggcgaaatttatcgccgccatggcggcggagaccggcgcgaccgcgcactgggccggatttaacgttcatctggcggcagatattctgcgtgaagcggcggcgctgaccacccagattgaagggcaaataattccgtccaacgtgccgggtaacctggcgatgggcgtccgccagggggcgggagtggtgctgggcatggcgccgtggaacgcgccgctgattctggccacccgggccctggcgacgccgctggcctgtggcaacacggtgatccttaaaggcgccgaactttcccccgccactcagggactgattatcgacgcccttgacgcggcgggcttcccgccgggcgtggtgaactatcttacctgtgcgcctgaagatgcgccggcgctggtggaatcgctgatcgcccacccggcggtgcggcgcgttaactttaccggctccacaccggtgggacgcattatcgcccgcacctgcggacagtatctgaaaccagcggtgctcgagctcggtggaaaagcgcccctgctggtgctggacgatgctgatattgagcaagcggcggcgggcgctgtttttggcgccttcgccaacgccgggcagatctgcatgtccaccgagcgcattattgtcgacaatgccgtagcggaggcgtttatcccgctgctggccaagcgcgccgccgccctgcctgccgccctcacgggcccggttgtcgatatgaacaccatcgcccgctgcaacgcgctcattgacgatgcgttagcgaaaggcgctcgcctgctgaccggtggtaaagccaacgatacccatatgagcccgaccctgctggacggcgtgacccgcgagatgcggctgtggcgtgaagagtccttcggtccggtgaaagcgattattcgcgttcatagcgaagaggaggcgctggcggtggccaacgacagcgagtatggtctttccgctgcggtctacagccgcgacagcgccagagcgtggaacgtagcgcaacgtctgcataccgggatttgccatatcaatggcccaacggtgcatgatgaggcgcaaatgccgtttggcggctgcaaagcctccggctatggccgctttggcgggcgggccgggatcgcggaattcaccgagctgcgctggataacgatccagacccagtcccgcgagcttcccttctgaggcccagcgcctcttaactatggctggcgataagctgcgccagcccctgcggattttcccacgccatcgagtgtccggcatggggcacgatgccgaccgggatcccttgtgcctgaacgaggtcgctatccgcataagggagcgaccgttctccgacgatcagcattttctggcagcgcagctggcatagctgggtaaaccagggcgtgtcgctgccgcgtatcaggctgcaggcggcccgccagacggcccagggggcgctgttttgtaaacaacccgcccacggcgagcgctcctccgccagcagcctggcatagccgtcagcgacaaaggctgactctgactgcgccgcaatgcgcctgctgtactcgccgccgccggcgaacagattaggttccgagaccagcagcgtggtcacccgctcgcccagtagccccgccgcttcgatggcgatgctccctcccatgctatgcccgaacagcgcgaagcgctgcaggcgcaggtggctgaggaactgctccaaaactaaagcctgctcatgtatgttgtaactaaacacgcgcggtttatcgctatagccgaagcccggcagatcgatgagtattttgcgccgttcgcggagcgcgggatcgctggcaatgcggggataatcgtaggatgacgcgcagccaaggccgtggataaacaccaccggaaggccatctcccgggaaatcgtgccagcgcagcgtggcgccagcgacggacgaataaaaaccgttcacctgtatgcctccatgataaggttactgtttttttatacagtaaccttatcctttgtgctacccctttctgccgtctagcgcctgagggttaaaacagcgagacgagcaacgccatcgggaagctgaacggccaggtggcgccgatcagcagggccgccagcaggcggatcatccggctctctttggttaaaaaccagctgatcacggcgcatatcacgcccataatggcgtaaaacaccaacattttttgatataacgtcattcttactttttccttccctgaggggcgttccatggtgggatgattatctgccatgacgtcgtgattcagagatacctgtataacaaaatcagaaacgggctgaatattcagaataaagcctgattcgtcttaatctgatagcgcaaccgctggcgccgtactatacctttaggacttactcattagggtggcgctatggatgtctccagtaaaaccgtcgttatgattaatgtctgcgccgcgttcgcgcttatcagcctactgtccgtaagatttggctggttttaatcatttaattcagcaacgaaacctaaaaaagcagccctggaggctgcttttttacgcgcgaacaacagagttgttatcttgctgtcgggcggcgggggctaactgcgcggcagctattaccttattaagtctggggttatagcgcggcagtacattgactttttcactatcccactcggcggcggcgcagacggcctgccctacgcccatcatctcacagctttggattcgtttcgccggggcattaccatagctcagcgccacagcgccgatagccagcagaataaaagcaaaaattttcacagcgacatcaacgtcaaaacctaatatgccctaaatgatcgcatgagcggcggcggaaagtcaaacccggggcgcgctaccgggcggcatccggtatttgcctctgcctcagggctataaaatattcagaacaaatatcatgcgataaccgtaaatattaaaagcttatctctagccgtgaaatactttctgttcaggggagttaatttcgctaataaggaaaatatttcgccgtcggcaaggggaaaaggatcgccgccttcgccacaggcgcaatatatcgcgcgggccgtcatcgtaagaagataaatggcgatggcaagccgttgtaacataacctcttcatctccgtcatcacggataagagccagaaatagcgctaaatgacaacaaatatcatttgccttcgcgtcagataatacttacattcataaccattggtaatgctttagcgcagttcgcgctgtgaatttcgaggtggatatgtccggaatcatcacgctggtcatcgcgctaatcctgctggtcgcggcggtgtataatcttatttcctacattcgtgaccggcgcagcgccagcctgcccagcaaaaaaaccaagcgctgaaagtaattaaagcggtattcttgttaccccggcgcgactggccggctcatctcttcgctcttctgcgagcacaaaaaagcccctgccgacagacaggggccgcaattcggtcgcgaaccgcgatgttgccgccccacccgccgggcgctgtgcgcccagggtgactggcggaccccatccggcgcttatctccggcactcatgatggcttagctcttgaaggggcatcagaataatctcatatcccctgggttgagttttgacaatttttgccattgtgactattagcggcctaacacacccatcgcgcaatagtcgcctggcgctaaatgatcaatcctttagctatgcttaaccatcacatggcggaccacggtataatcctcaaggccatacatcgacatgtccttgccgtagcctgacagcttctggccaccgtgcggcatttcgctgaccagcataaagtgggtattgacccaggtgcagccgtactgcagcctggcgctaagacgatgggcgcgaccgacatctttcgtccataccgaggaggccaggccatactgagagtcattcgcccagctcagggcctgcgcttcatcgctgaaaggcgtcacgctgactaccggaccaaacacttcgcgctggacaatagcgtcttcctgccgggcgccggcgagcagcgtcggctggaagtaatagcccgcgccgtcagcccgactgccgccggtgaccaccttaatgtgcggcagcgcccttgcggcttccaccgccgcgctaacgcgctcaagatgggccagcgagctcagcggacccagttcggtggcagcgtcctccggcgcccccattttcaggctggccaccgccgccccaagtttctccaccagctggtcatagataccctgctgggcgtagatccggcaggcggccgtgcagtcctggccggcgttgtaaaaaccgaaggtccgcaccccatccaccaccgcatcgatgtccgcatcgtcaaaaacgatcactggcgccttaccgcccagctccatgtgggtgcgtttaatcgacgaggcggtatggccaatgatatgggctccggtggcaatcgatccggtcagggagaccattcgcactttaacgtgggcggtcaaggggtcgcccaccgttttaccgcggccaaacagcacgttgataaccccctccgggaagatatcttttgccagctccgccagcttcagcgccgtcagcggggtgatctccgagggttttatcactacgcagttgcccgccgccagcgccggggccagcttccaggccgccatcatcagcggatagttccacggcgcgatggaggccaccacgcccaccggatcgcggcggatcattgaggtatgcccttcgagatactctccggccgccatccccggcaggcagcgagcggcgccggcgaagaagcggaagacgtcgacgatggccggcatttcatcattaatcacgcagtgcagcggcttgccgcagttcagcgactccagctgcgccagggtttcagcctgcgccgagatggcgtccgccagcttcaggagacattccgcacgcgtcttcggcgtcgtctgactccaggcatcgaatgcccggtccgccgcctcaacggcggcatcgacctgggccgctgtcgcttcggcaatctccaggatcacttcgccggttgcagggttatataccggaaccttctcgccttcacctgccactaacttaccgtttatcaatagattgtgttgcatagcattatcctgtttcatggttttatttcccgtttccggcgtcgttatcgccgtcgcgggtgagccaccaggcccctaagattggtatcgtcgttaccagcatcaccaacagcgcgacaacgttggtgacgggcacatctcgcggccgccccagctgattcagcaaccacagcggcaaggtgcgttcatgccccgcggtaaaagtggtaacgataatttcatcaaacgacagagcgaatgccagcattccccccgccagcagcgccgaccccagattgggcagcactacgtaacgaaaggtctgccaaccggtagcgcctaaatccatcgaggcttccaccatactccacgaagtccggcggaaacgggcgatgacgttgttaaacaccaccaccacgcagaaggtcgcgtgccccaccacgatcgtcagcaggccaggctcaaggccgaccgctttgaacgccgtcaggagtgccaggccggtaatgatccccggcagggcgataggcagcagcagcagtagcgacaccgcatttttgccaaaaaaggcgctgcgccacagggctcctgcagccagcgtgccaagcactaaggcaatggcggtcgacagggcggcgatcttaagtgacagtgtcactgcctgcagaatgtcgctgcgcccggccgcctcgctgaaccagcgcagcgtcagcacctgcggcggaaagctaaaggctgcatcttccgtattaaaagcatagatggcgataatcagcagcggaaagtggaggaatatcaccccgccccaggtcgccagtcgcagataccagggcgcgcgttcagagtgcatcgaaggctcccagacgtttcacgaacgccagatagagggcaatcaagacgataggcaccagggtaaacgccgccgccatcggcatattgccgatcgccccctgctgcgagtaaaccatattgccgataaagtatcccggcgggcccaccagctgcggcacgataaagtcgcctagcgtcagcgaaaaggtgaagatcgacccagcggcgatgccgggaatggccagcggcagcaccacgtagcgaaaggtctgccgcggggccgcgccgagatcggccgaggcctgtagcaacgatcccggaatacgctccagcgccgcctgcaccggcaggatcataaacggcagccagatgtagacgaacaccagaaagcgtccaaggccggaggtggacaaggtattgccaccgaccgccgggacgctcaacagcgcgttcagcgccccctccagtccaagatgaccgaggaaccactgcgccacgccatctttcgccagcagcagcacccacgcataggctttgacgatatagctggcccacattggcagcatgaccgcgatataaaagaaggccttcatttttccgctggtgtagcgcgccatataccaggccatcggcagcgccagcagcgcgctggccagcgtgacgcacagcgccatcaccagggtccgcacaataatgtcgtagttggcagggttgaacagcgcccgcaggttagccagcgtgaagtcgctggtcaccgacatggtgaagtcgtcaaaggtataaatgctctgccacagcagggtcagcagcgatcccagatagacgatgccaaaccacatcagcggcccgagcagcagtaaaaacaggcccagcgccggtcggcgccagaagatccccgatatgcgcccggtctgcgcaggaattattgccatggtcatctcagcctccgctttccagcggggtcatcgccgagcgcgaccatgacgcctgtactatttccccggttcgcggaacgctggccgccgccgcgccatcgatgttggcctggctgaccagcagtttgtcgccatccgcgaggcggagctcgatccgcgtcgccgccccctgatactgcaccgcctgcaccacgccctgcacctgcacctcgccgccgccctgcaggcgaacatgctccggacgcagcgaccagctgcccgccatcccgcacaatcgtcgggccgcctcggctgcaaaaacgttggcggtgccgacaaaaccggccacaaacgcggtcctggggtgcagatagagatcctgcggggcatccacctgctcaatgcgcccgttgttaaacaccgccacgcgatccgacatcgacagcgcttcgctctggtcgtgggtcacgaagatgaaggtgatccccagcgactgctgcagctttttcagctccacctgcatctgctcgcgtagtttcaaatccagggcgcccagcggctcatcgagcagcagcacccgcggctggttcaccagcgcccgggcaatcgcgacccgctgccgctggccgccggagagctgggagggcttgcgatgatgagcaaagccaagggccaccttctccagcgcctcctgggcgcgggcatggcgcgctttcttcgccatgcctttgaccatcaggccgtaagcgacgttgtcaaggatcgacatgtggggaaatagcgcgtagtcctggaacacggtattcacatcccgctgccagggcggcagttcgctggccggctgaccaaagatatggatggttccgccggagagctgctcaaaaccggcaatcagccgcaggcaggtggttttacccgagccggacggacccagcatcgagaaaaattctccatcgcgtatgccaatgctaaccccatccaccgcccgcacatcgccatacaggcgcgatacattctggaactcgaccgcgtacgtcattgtttgcctccgatccttagcggccgcccattatcgcaatatagtcctgagtccagcggctatagggcacgtatttcccgccttccgcaaccggcgttttccagaagtgaatgcggttaaactgctcatagccgttggtctcacagcctttatcaccgagcagcgcgctggctttacagccctcaggcaccaccggcagcgaaccgaaccaggccgccacatcgccctgcaccttcggcgtgagcgaccagttcatccatttataggcgcagaccgggtgcttcgcctcgctgtgcagcatggtggtatccgcccagccggttaccccctccttcgggaacacggtggcgaccggctggccttccgccttcaggccgttggcttgatagggccacgaactggaggcggctaccccttcgtttttgaagtcgttcatctgtacggtggcgtcatgccagtagcgatggatcagcggttgctggtcgcgcaggactttcagcaccgcgttgtactgggtttcggtcagttgataggggtcttcgatccccagctgcggctgggtggctttgacaaacagcgcggcgtcggcgatatagatcgggccatcataggcctgcacccgcccctggttggttttaccatccggtagatcctgcttgacgaacaccacgcgccagctgtccggcggcgtcgggaatacgcgggtgttgtacatcagcaggttcggcccccactgatacggcgtgccatagactttaccgccgacgttaaaccacgcccccttcgcaatacgcggatcaagggagccccagccggcaatcagcgccgtgttgatcggctgcacgcgtttgcccatgatcaggcgcagcgaagcatcacccgaggcggtgaccagatcgtagccgcctttggccatcagactgaccatctcgtcagaggtggcagcggttttgacattaacctggcaaccggtgtccttttcgaactgactcacccagtcgtactgtttgtcggtctgaccgcgttcgatatatcccggccaggcaataatatcgagccgcccttccggtttatccagcgaggtgagcggctctgccgcctgaacggtcaaacaagccatacccagcacataaaggctgcaacgggcaatttttttgctcatcaggtgttactcctgtcacaaaggaattagcggcagccgtgccgtaaaaatatctcctgaaataagggtagtcagcggattaacgcccccaggggaatttattcaggttgtgacccgggacgcattacgtaaaaatcgccaacacaagcaggactttatggattatagacaacgagttagggaatgaggaggggtatgcatatttcctatggtgagcgccggtaaaataatgaccggcctcgataaaaatcctctttcgcttattttcgcagaatgtttatcatgagaaaaataaacgacagggtcaggcaagctgttcgcgaataagttcccccaggcgcttcaccccctgctcttcgcgttccccccagccccaggcggtattaaaacggaaaaacgaggtccagctgtcggaggtggagaacattttccctggggcaatactgatgtgcgacgccagcgcccgggcgctaagtgcgctagcgtcggccccttccggtagttcgatccacagaaagtagccgctgtcgctgtggtggacgatgacctccggcggcagatggcgcagcagcgcctgccaggcctgctgtttacgctccgccagctgacgacgtagacggcgcaggtgggcgtcatagcgcttggtggacaggtaatccaccagggctaactgcatcggcgaactggtggaaagcgtactcatcagctggagctgctggatccgccgcgcctgtttgccggccgccacccagccgatacgaaagccgggtaccagacattttgagaacgagctgcagtgcagcgtcatctcctggcgatcccagaacttcgccggtaacggcttttcgcggccaaaatagagctcgctgtagacatcatcttcgatcaacatcacgttatagcgcgccagcagcgccaccagcgccgcttttttttcagcgctgagggtgaagccgagcggattctggccgttggtcatcagccagcaggccttcaccggatagttttgcagggccgcctccagcgccgtcagatcaatgccttccctgacgtcagtggccaccgacaatgctttcaaacgcagcctctccagcgcctgcagggcgccgtagaagcaggggttttccaccaccacccagtctcccggctcggtcaccgcctgcaggctgaggttaagcgcctccagcgccccggcggtgatgacgatctcgtccggcgagacgttcatcccctgcagggcatagcgacgggcaatggcatgccgaagttctgcattccccggcggcagattctcaatgacgctcatggcggtggcggttttactcacctgcgccagcgagcggttgagctgctgcagcgggaagagacgcgggtccggaaaggccgaggcaaagggcaacatcgacgcctggcggctggcctggagcacctcaaagatataggtattgatatcgacggcttcatcgcgagtgacctgggcaggcggcgccggctggcggagcttcaccggctggggggcaacataataacccgactgcggacgggcgacgatgcgcccctggctttccagcagctgataggcatggctaacggtcataaagctcatgccgctgctgatcacctgctcgcgcagcgacggcagccgatcgccaggcaaccagacgccaagggcgatctgctcggtcagttgctgcgccaactgttgatactttttcattgcggccgtccccgtacgataacgtcccattatcatatatcagttataaaaaaatcatagtttcctgtaactgttatatctgcagcggcggccgcgtcgccgtgatagcacgggatgggtttaaaatatcaccacccagaatagcgagattaaaacaaaccagaagataatcattacgccaagcgtaatgcacagactctgtaatcctttttcagacattggcattcccttttatttattcccgagctcatacagtacaaattagccgcggagccgacaatttattattatttaatttacgattaaccggctcagcgtttttacttattctcatactaatgagtgataataaatcagagtaaaaatccgtggcggatttcgtaagccaaaatatgagctacggcgggtggtaaggatatattatgccgaccaggtgactacgccataccggcggcagggccgcgtagccagccgttagcaataatatgacagacagcggaatagcgcctaatcaccttccgcagggattaatcaaggttgctcaaggatattttctcgccctggcaacagctgaaaaatcataacagcggccaactgttatgataaaaaatggcgtgactgcctctgcccctcagtcgtcactccacctaaaattgcgctgaatcaattttgttgtggagtcctgcatgttcggtcttgatgcattccatctggcgcgagttcaattcgcttttacggtctcatttcatattatcttccccgccattaccatcggactggccagctatctggcggtgctcgaaggcttatggctaaaaacaaaaaatcccgtctggcgctcgctgtaccatttctggtcgaagattttcgccgtcaacttcggtatgggggtcgtttccgggctggtgatggcctaccagttcggcaccaactggagcggtttctcacagtttgcaggcagcataaccggccctctgctgacctatgaagtcctgacggcattttttctggaagcgggcttcctcggggtgatgcttttcggctggaaccgcgtggggccggggctacactttttcgccacctgcatggtggcgctgggtactatcatctccaccttctggatcctcgcctctaacagctggatgcagaccccgcaggggtttgagatcgttgatggccaggtcgtgcccgtcgactggctggcggtgatctttaatccgtcgttcccctaccgattattgcatatgacagtagcggcatttctcagtagcgcgctgtttgtcggcgcctcggcggcctggcatctgctgcgcggcaatcagtcgccggcgatccgtaagatgttctcgatggcgctatggatgacgctgctggtcgcccccgtccaggcgctgatcggcgatatgcatggcctgaataccctgaagcaccagccggcgaaaatcgccgccattgaggggcactgggaaaatccgccgggtgagccaacgccgttgctgctgtttggctggcccgatatggaccaggagcgcacccgctacgggcttgagataccggccctgggcagtctgatcctcacccacagtcttgataaacaggtgccggcgttgaaagagttcgctcctgaggagcgcccgaattctactgtggtgttctggtcatttcgcctgatggccgggctgggcatgttgatgctgctgctgggcgtgctggccctgtggctgcgtcgcggcgaccggctataccactcgcggccgtttctgcgttttgccctgtggatggggccatccggcctgatcgctattctcgccggctgggtgaccaccgaggtgggccgccaaccctgggtggtgtatggcgttcagcgcaccgccgatgccgtttccgctcatggcgatctgcatatgtcggtcagtttattgacctttatcgtagtgtacagcgccgtcttcggcgtcggctacagctatatgctgcgcctgatccgcaaggggccgcaggagatgctcccggcgacaaccggtacgccagcccgcccgctgtccgccgccactgaaggttatctgcagaaggagtcccgctaatgggtatcgaattatcggtgatctggttcgtgattatcgtctttgccacgctgatgtacatcgtcatggatggctttgatctgggcatcggcctgctgttcagcacggtgcggggcggcggggatcgcgacgtaatggtcaacagcgtcgcgccggtatgggatggcaatgaaacctggctggtgctcggcggcgccggcctgtttggcgcctttcctctcgcctacgcggtgatcatcgacgccctgtcgatccccctgaccctgatgctgatcggcctgatttttcgcggcgtcgcctttgagtttcgcttccaggccacgccatcgcaccggccattctgggatcgcgccttttttggcggctccctgctggcaaccttcagccagggcgtggtggtcggggcggtgatcaacggtttcaccgtcagcggtcgcgccttcagcggcggcatgtttgactggctgaccccgttcagcctgttctgcggattcggactatgcgtggcctatgcgctgctcggcgccacctggctggtgatgaaaagtgaaggcgcgctgcagcagagaatgcgcagcgcatcgcggcagttgctgggtgccctgctggcggtgtttgccgtcatcagcctgtggactccgctggcgcacccggcgattgctgcccgctggttcagcctgccgaatctctatttcctgctgccggtaccgctgctggtgatcctcgttagcggctggctgtggagcacgctgcatcagcgcgaccgccatgtttcgcccttcacgctgacgctgggcctggtctttctcggcttcagcggactagggatcagcatctggccgcatattatcccgccggccatcacattgtggcaggctgccgctcccccgcaaagccagggctttatgctggtgggcgccctgctgattattccggtcattcttggctacacctgctggagctattacgtgttccgcggcaaagttcagcctggggagggatatcactgatgcgtactgcctggcctaaacgtctgctgtggctgatcgcgctctggggaggtagcgtactgacgctggccgccataagcctgctgtttcgcctgctgatgaccgccgcagggctaaaagtctgagtgggatgcagagaggtccgaaaagggacttctccatcttatcttcacttttgcctgatgaaatacggcgatacatctgaagaaaggatattgctatgaagaagttagctttactctccgccgtaatgacgctgggaatgtcgtcatgggcttttgctgccgacaacccgccgccgccggaaaaaggcgcgcagcatcagggtaaaccgccggtgaaaaacggccaacacgaaggtaagcaagcgcaatacaacagcaaacagccacaacgagacggcaaacagccacaacgagacggtaaacagccgcagcacgacggtaaacagccgcagcacaacggcaagcagccgccaaaagggagcgagcacagcgggaaaccgctgccgccgaaagcgtaacactctggcctggcttccgcgtcaggccttttttcatccttcgtcagccatcgttgacaaactcttgccgttctttgagatgcctggaaaaaagcctgcattgcgcctgacatagtatgtccacgccattgttccgtcgagaaaaggtatgttaaagagaagcataagcgccctgctgttactgtgcgcattattttccgggcatctgttagcccatcgtcagggacacgagtactttccggtgcaaagtctcgaacagcagctgctgcacgaagcggatagcgatgagcttcgcagccagcacgaggaggccgccgcagacctgcgcgaacatcaccgctggcaggacgaccgtaaaccgcgggcatcctgccaatagcatcgactcgaatcaggcccctttgcgcttcggcagcgtcttcatcagatcgtccgggctgacggaggccacaatgctgcccgggtgcggcattttgaggatatggtttttgatcttgccgaccacgtgcatttcgcacggacggcagtcaaacttcagggtcaggacctcatcgccatggatcagctgcatcggcgtggctttccagctcttgatggagcctttcgcctgcttcgggcagaggttgaaggcgaaccgcagacaatgcttagtgatcatcaccggcacatcgcccttctcttcgtgcgcttcataggcggcgtcgatcagctgtacgccatagcgctggtagaacgcccgcgccttgtggttatagacgttggcgaggaaggagagatgggtctcagggtagaccggcggcggtacggagaccggcttgcgggtgccgcgctgccaggcgttgaggcgcgcttcatccagcatctctgcagtttcccgacgcagctggttgagcaggctgttgggcacaaacagcggcggcagattaacctgcacctcgcgcgcatagtaaatggtttgccccagttttgtgacaccgtcacgcaggttggccagcgctttctccgcctggttagcttcggcgaactccccgtcaagggtgtgggtcacgctgacgccatcttcacaggtcatggtgagaaccagctgctcctgccagccgctcaacgtcacatctaccgcgatgcggcgttcgctggaggtctttagcagcgcctgttgccagttatgatcgaggttgcggttgagcggctgatgggggcgcactttatgcagatccgctggcatctcgttcggccatacccgataacggttttcgccggttttttccacggtattagcacggaagcccaccacttcgcgcttaatcatcacgttgagaccatcgccgttggttaacggttcactgacttcaacgtcgagatggtctttgcctaccttcagaacttcacccaccggcaggccgataaatttcggcgaatcaaaggcgccgatatcgcctttgcgggcattaacaaagtagtcagtgctgccccggtggaaggttttatccgtggacgggataaagaaatgctcggtgcgtccagccgaggcgcgcgccaggtcgccgcgatcttcgataatggcatccagcatttgacgatagtgcgcagtgatgtttttcacataactcatgtctttgtaacggccttcaattttgaaggagcgtacgccagcgtcgatcagcgccgccaggttggcggtctgatcgttatccttcatcgacaggagatgtttctcataggccaccacccgcccctgatcgtccttcagggtatacggcaagcggcaagcctgcgagcagtcgccgcggttggcgctgcgtccggtctgggcgtgcgaaatgtaacactgcccagaataggccacgcacagcgcgccatggataaagaattcgatagtggcgtcagtgtggtcgtaaatggctttgatttgactgaggttcagttcgcgcgccagcacgatctgactgaagccggcgtcggagagaaacttcgctttttccacactgcgaatatcgcactgggtgctggcatgcagctcaatcggcggcagatccagctccatgatccccatatcctgcacgataagcgcatcgacgcctgcgtcgtagagatcggtaatcagccgctgcgccggctccagttcatcgtcatgcagaatggtgttcagcgtcacaaatacctttgcgccaaagcgatgagcgaaaggcaccagcccggcgatatcgctcagactgttgctggcgttgtggcgggcaccaaagccaggtccaccgatgtaaacggcatcggcgccgtgaaggatcgcttcgcgagcgataccggcgtcgcgggcaggactaagaagttcaagacgatgattgtgcaggcgcatacgcgtgttgttatccagtataagggggtcgaaatggcggctattgtagtcagaaccgggcgcagacgaaaaccttttccgccgtcgctggacgacgaattttcacttttcaacaaagtattgacggaaaagatatttccctcaaatcacggcgaagagtactgtcatcacgtattccggattttcctcgtcacgttgtgagtggttatcatcagtcatcttgtctggccgcgggttcgctcgcggttttttcttttggataatggataagagaatggaaatgggccgcctgggcgccgcggttacgatacgcatgcgtcgcgtcgccggcgaaacgcctaccctcacccgcctgcagcgagtgccactccccttgtaagcacaaatccagcgtaccacttatcactaccacatgctcaatcacccctttctcatgcggcgttgattcgctcagcgcgccgggggcaagggttatcgaaaaatggtcaaagcgcagctcgggatcccacgggaatactggcgtcaccaccatcgcctgctgctgcggatcaaacgcggagggcgcggcgctggcgtccgggacgatgaacgccgaaaacggtacgttcagcccggtggcaatcttccacagcgtcgccaccgttggacttgattcattccgctcaatctgcccgagcatggctttcgacaccccggtctcttccgccagtcgcgacaggctccagcctcgctgctggcgcagggttttaagcgttgccgccagatgttgcgcaatattcatccttcctcctgtttttactgcgcaaagtataccgccatttgtctgattttttcaggacgtttaacggcatcgtacgccactggcggcgagtttttctcccagggtagctgcgcgaaccaccgcttgtgcgctataacgcacaatgatacattgaatggatgttataacgcacatgagaatcatctatgcgctcgtttagtcttccgcttcccactctgttcgctggcttcgtcgccgtgttggtggggtacgccagctccgccgccatcatctggcaggccgccgccgcggccggcgctacccccgggcagatcgccggctggatgacggctcttggcctcgccatgggcatcagtactctcgcgctgagcgcctggcggaaagttcctgtgctcaccgcctggtcaacgccgggcgctgcgctgttagttagcggcctgcagggggtgaccctcgccgaggccgtggggatctttattttcgccaacgcgctaatcgttatctgcggcgccaccggcctgtttgcccggctgatgcagatcattcctcattcgctggccgccgcgatgctggctgggatcctgctacggtttggtttgcaggccttcgccggcttacaggatcatctgccgctgtgcggcgggatgctcgccgcctggctgctgtgtaaagcgctgtgcccccgcttcgccgtggtggccgcgctggtgattggagcgctgattgcggcggcgtccggggatgtggctagcgccgccgtgccgctggcatttgtgacgccggaatgggtcgccccgcagtttactccggcgcttttgctcagcgtcggtctgccgttcttcctcgtcaccatggcctcgcagaacgctccggggttcgccaccctgcaggcatcaggctataccgtaccggtctccgcactgatcgtcgtttgcggggggttggcactactgctggcgccgtttggggtttattccatctgcatcgcggcgatcaccgctgcgatttgccagagcccggaggcgcacccggatccgaaccagcgctggctggcggccatagccgcgggcggtttttatctgctggccggtctgttcggcgggtcaatcaccgccctgatgtcggccctgccgccggcgtggatccagatgctggcgggtctggcgctgctcggcaccatcggcgggagtctgtttcaagcagtgcatcaggccagtgagcgcgatgcggcggtgttaaccttcctggtcaccgccagcggggtgacgctggcgggaattggctccgccttctggggcgtggtgctcggcggggtgagttacggcgtgctatccgcgctgcgccgcccgtagctgggagggcgtcaggcggtggcggctttgacccgatggctgaaatggctgggggagctaaaaccacaggccagcgctatctcggttaacggcagcgcgctatggcagatcaggttttgcgccttcgccattcgctgctgcatgacgtactgatgcggagccatatttagcgactgacgaaacatacgagcaaaatgaaactcactcagacccgcctgctgcgccaggtcggccagggtcaagggctgatcgagatgagcatcgatccaggccagtacgtgacgctttacgcctggcgccagcccgccggtgaccgtcggcaaacgccactgcacggtggaatagtgctggatcagatgggtaagcagtaagctgctggcggcgctgagggtcagctggttcgccggctgccgccagtcgttagccagcaaaaactgacgatacactgcggtgattttatcatcgctggcgaaggtcttttcctgtagggtgaaattcgccgggctgcggtcccacacctcctcgccgacgcgacgcaggtgcgcatcggtacagtaaagatgcacaaacgacagatcgccgcggatatcccatacgctttcatcgcctttcggcatcagacaaaaacggtccgggccgccgccatttttccagccgtgcggcgtcttttgatagctttcgtagccatcagccacgtacagacttaaggtatgatggtcgctgcgcaccgtcacggtatcgcaattgttataccaggcggccagttgaataccggaattcagctccacggttcccttcagcaccgcgttctgtcgccgtaatgtttcaaatgtcccgtaacccatcgtcttcacacattgtctgtaaaagccctagtctagggagactacggcgcggtttccagtcctcaccgccagcggatggcaaataagcgcaagaatttgcaagccgacaacaaaccggtgaaagccgcagcaggcggcagccggcatactcctcccatcaacaggtagaggagaaccagggtgaacgcattactctatgcactcgttgtcgtgatctggggtacaacgtggattgcgatttttttacaacagggaccggtggccgcgccggtatcgattttctggcgtttcgccgtagccagcgtcacgatgctggcgattctgctcgtcacacgacgcctgcggccgctgggcgcgaaagatcatctctgctgcctgctgcagggctgctgcgtcttctgctttaatttctggtgtttttataccgccgccgcctggatcaataccggtctggaatcggtgatcttttcgatggcggtactgtttaacgccatcaacagctttctcttttttcgccagcagccgccgggccgcttctgggccgccgccgcgctgggtctcgccggtatcgtcatcctgttctgggacgacctgctggccaacggactgaacgcctcgctgctgtgggggatcgggctgagcgccctaggcacctacggtttttcgctcggcaatatgttcagtattcgccaccagcgccgcgggctggaaacgctgaccaccaacagctgggcgatgctctacggcacgctggtgatgggggcgatcgctctgctgcgcggcgataattttatgccagaatggaccgtcagctatctgggcgccctgctttacctggcgctgttcggctcggtcatcgcctttggcgcctatttcactctcgttgggcgcatcggcgccagcaaagccgcctacagtacgctgctgtttccgctggtcgccttatccatttccaccgtctatgaagggtatgtctggcacagcaacgccgtgatcgggctggcgctgatcctgctgggtaacctggtgatgtttgccaaaccggaacagctattgctgcgccgaaggctggcctgaggaggctgaagaaaaacagcgccgtcgtcagacggcgctggcacgattaacgctgagagggatcgaatttaacggcgtcgaccgccatatcatcgataacctgcttcagggtatcgacggtcagcggtgtattctcattcgccagggttttgccttcccctttccgaacgaccttgatgaccggcttattggtgctggcgtcaatgacctccgcctcaaagtacagatcggtgtccatggtacgatggccggtggcggcctgggtgccggcgacaatcatagcgaccgggatcacttcatagaactgcagcccctctttgctggagtccaccccggtgatcgccccgcggaagatgaggctgcgcttgccggcggtagtggccagcggtttacgctcggaaatagcctgtttcagctctttgttggtgtagttaagaatatcctgcagcgccttctcccctacctgggtggtcggcttcggtaccggatagtaggtcaccgggtgataaacaatattgtcatagttggccggattgaagttcggatcgatccagcgcagctccggcttgccggaggcagaggtcgtttctttcaaactggaataatcttttaagaagcccgaatactgatccggttgcgccactttcgccgcacagccggtcaacgccaatattcccgccagagcggcgactttcagtaaaacgcgagtacgcatagagagatccctgtaaatgcagttttttttcggcagacgttatagcaaataggacccactagttttgtgacaaaaaaagggcttcgtcaaggaagatttataaatattgattgcctgaacattacgttaataaataatcacttaaaaggggtatcgcgcggttttccaggctcattttcgccgcaacgggtctctgtcttgcccaggctctggcggggaatgcggcgcgggccatgctcagcttcccacgccgcggcgaatcaggcaggcttgcgcgccaacagggtggcgaagcgcaatttgatgcgattgccgttggcgtcggtgcgatgcagctcaccgacgtcctcattgtatttcagcagctcccagccctggtaataatcacgaagctcatcaggtttaaaggcaaacgggaagccgacggtgcagggatagtcttcggtatccatcgccgccacaatcaggttatagccgccggcggcggtgcagcgctgcatattggcgatcaggcccgggatggtgtcaggctcgaggaacatcatcactacggtggagaggatcaggtcatactcgccgccaaagctcaggctgttgaggtctttcaccgccgtttgcagattatccagtcgctcggcggcgcgaatactttccagattgttgacgctcatcggatttttatcccacgccgtcaccgcgaagccgttcgccgccagataaaggctgttacgcccgttgccgcagcccagatccagcgcccgccccggcggcacaatcgtcgcggcatgcagcacctcggaatgggtgcgggtcaggctgtatttttgactaaaataatccgcgtcacgctttgtcatgatccttccttcttattcaggagtgtttcccggtcgacctggagcaacagtttcccgctgaccaacagcaacgctgtacgcagcagcagcaggccgacaaccagattgctaaaaataaatagcggcatcgccagatgatgaaaaaagccgtctcccctggcctggccgagatgcagaccggtggtggccagcgaggaaatgccgaacgaaaagctccagaaagaagcattgaacggctgacgaagataccagggcatcagacggagcataaacagtagctgcagcaggccgtaaccaaacagcagcttagcgaaggtatcggcctccccgccgttgacgctgagccaggcgctgcaggccaccagcgcaggcgccagctggatccccagcgaggtgcgcagcggcgtcggcagctcgcctgcgctgcgcagacgctggaggatcgccggctcgaggctcagccaggagaagaccccggcgccgaggaacaccagtccggcatcggaaaatcccagcgcgccgcaggccatcgcgctgataaaattattggctactgtcggcagatacaaccccggcgtggtggcctcgcgaggatggttcccccgccatagcccaccgctttgccaggcggcataggcgagctgcagcgccacgcccggcacaaacagcccgatcgccagcggccggcaccagggagccaaaccaatcgccaccaacagcgtggtggccggaaacaggctgacgaagctgctgctcaccggatgacgcatctcccgcagcacgctcgccggaaagcggatcgcccggctgataaacgccatgctgagcaggacccacatcgccatcgccagcgtcaccagcccatcaccaatgctgcggctgaccggccagagggtgctggcgtaacgccaggcgaagcccattccgatggtgccgagcaccatgccaaaataacccgccggcaggtttagcacctgccgcggcgtttgcgttttattcattttattgatgatatcaatttaatttgaagttgcattttaaaggaaccttatcccgcgcgctatggcgatctttgctatgtttatgttaaccataagtaataaggatcggccatgcgtaaataccgtctcagcgaacagacccggcagtattgttatgaggaagagcatggcaaacaaagcgtcaccctgcgccagatcgtggcgcttattgatttcgctgacgtcaaagcgggcagcgaaggcggctgggtggatgaggaatgcgctctcagccagcagggggagtgctggatctacgatatcaacagcgtggttttcgccggggcgcgcatccgtgacgacgcccgcttaaccgggttctgcgtggtcagccatgaggccaccatcggcggacgggcctgcattcactcctcgcagatcagccatcacgcgcagatcagtgacaacgtcacggttatgcagagccaggtgcgcggttattgtcgccttgccgacgaggcgcgccttctcccccactgccaggtgattgccgcgcgcgggttaaccgccgatcgcgacaaagtcctgcagatctatcagcgagccaccgtcagcgcctcgcgcattctccaccaggcgcaaatctacggcgatgccttcgttgagcatgcgtttgtcgaacatcgggcggaagtgtttgaccaggcaagacttgaagggaacgaagaaaacgacgtctgggtatgcgataacgcccgggtatacgggcacgcgcgcctgatcgccggtcgcggagaggatgccattcccaccgtgcgctacagttcgcaggtggcagagaatgcggtgattgaaggcaactgcctgctgaagcatcgggcgatggtcggcggcgaggcgcagctgcgaggtggtccgattctgctcgacgacgatgtgctgatccaggggcggacagtcatcaccggcgatgtgatcgttgagcaccaggtctccatcaatgacgaggtgcagattgccgcacaggagggagaggccattcatctgcgcggcccgaaaacgcttgacggccagcagcacatcacccgcacgccgctgttaggcgcgctttaatgcctcatcgcggtcaataatgcgggcgtagatattctgatcgtcatagctaccgttcagatactcggcttgtcggagacagccttccagaacaaacccggtgcgcaacgctacctggttgctgcgggtgttcgccacccggcatttgatcacaaaccggcgcaccagcccgctggcggcataatggcggataaaggcctgtaatgaacgggaaagcagcccttgcccctggtgctcttcatcgatccagtagccaatataggccgttttattctgcggctcgatctgattgaacgacaggaccccgactagctgcttatcgagaaacagcaaaaacattttggcgtaatcccgctgatgcagcatcacgttgccctgcacatggcggcgggtctcgtcttcgctgcgcacctcggcgggccaactgagcgactgctgtagccagcgctggtttttgaccaccagctggtgcaggtcgctaacgtagcgctcatcaatggcgattagcgtcagcgcgtcggttaccgggatcgactcaggtactgctaggatatctgcggtcatagcgctctcttctggcccgcagggactgcctgcgggcgtcgggtgactcagggttatttcatgatccgatcgtcaacgtagtttcgtttatctgctgccggcgggaaatactgatagagccaggtttcgctgatggcttctccctgacagcgcaggaacagacgcatctccaccgggtcggttgagtcggtggtcggataccagtcgaaaaggatccggtagccatcgaacggctcgacgtagaggatctcaatctgcttcgcttccccgctggagagggtgatcaccggttcaataccgcgcggcgcggccgccttcaaatcgccgccgacaaagtcgatggcaaaacgacgcgcccacttatccgggtagtgttcacccggcgcccatccttcggggaagccccccatcccggtgcgggtggccagaacgcgcgccagcggagtgctcaccggcggctgcgcgctccagtaaagacggtagcggaagtccagttcgtcgcccgccttcaccgccttttccggctgccagaagcagacgatattatccagcgtttcgccggtagttgggatctccatcaggctgaccgcccctttgccccactggttacgcggctcaacccacaggctgggacgcttgttataccagcccatcacatcctggtagtgggagaaatcacggtccagctgcaacagaccaaagccgcgcgggttcttgtcctggaaggcattgaactgcagcttctgcgggttattcagcggccggcagacccattccccgttgcccaaccacattgacagccgatcggagtcgtggatttgcggatggatggtgtcgcacatccgccgctcattattgccgcagctgaacatactggtcatcggcgcgatacccagctgtttgatatccttgcgggcgtacaggtggttttccacgtccatgataacctgggtatcctggcagtggatggtgaacttgtaggcgccagtgatgctcgggctgtccagcagcgcgtaaacggtaaacaccgtggcgtcccctttgaccgtttcgaaccagaacgacgtaaagtcgggaaactcttccggggtatcggtaaaggtatccaccgccagaccgcgggccgacaggccatactgataggtgctgtctaccgcgcggaagtagctggcgccgaggaacgccacgatatcgcggcgcgccagctccggcgctttaaacacccggaacccggcgaagccgaggtcagactgtccttccagctgacgggtatccacaccggcgtcattgtacttaaacagctccggacggaagtggatctcgcgcgcctgctgggtgctggcgtctaaagagaacatccgcacgcggcgacggaaccccatcccgacgtggaaaaactgtatgtccagcttacgctcttcaatattgttccacagcgagtggttggcatcgtactggatgctgttataggcctgcggggtgagattggcgagcgtcggcggcagatcgcgcggggcgccgccccacggctggcgcgccagatcgtgagccatcgcctgcagaacagcataatcaaaacgacgcgtttgcccgtcggcaatgcccgcgtcttcggcaaaagcggcctgactgaataaggaagcgactcctgacgttccgcatacggcggcaacagccatggaagatttaagaaaacgtctgcggttcatgcctgagaaagcgtccttctgcacgggtgaattgattcgcaacgcgtcatcacgctgcgtgataatttccgcccactctagacaaaaacgattaataatccaattgttgccagcagaaaaaaggtaaaaaagccctgtccagaggaacagcctgtttttttcatttcctctgacgtgtagccagggcatacacgctgcctgccgctttttacccctgactattcaagggaaatctattctccagtgctgaatattcaccccatgtatcgctcctcgccgcgcgcgttttttaggcacgattcgcgcaaatttccatcgcgcctggtgctaacttttccccgataaccgctatctttcttcacgttagcggccaacaggggagagccgttcgggctgtcccgccacgctctccagggaattcattcaggagtcatgccatgcaagtgaaagcagccgtcacgctgggctaccagcagccttttgtcatcaaagacgtcgaggtcgccccgccggggaaggacgagatattagtgaaaattgtcgccaccggcgtctgccataccgacgccgtgatgcgcgacaaccccggggtggtgcctatgccggcgatcctcggccatgaaggcgccgggatcgttgccagcgtcggcgaggcggttagcggcatcagggtaggagaccacgtggtgctcagctacgccgcctgccaccactgcgaaaattgtttaagcaaccacccttcggcttgcgaagattttaatacgcttaattttggcggccgacgcgaggatggcaccaccccctaccggctggaagaccaggatctgtccctgttctttggccagtcgtctttcagccagtatgtggtcacccgcgccagcaacgcggtcgtggtcgacccggaggttgatctcaccttgctcggcccgctgggctgcggtatccagaccggtagcgggacggtgctcaaccgcctgaaaccggtggtcggcgaatcgctggtggtgtttggctgcggcgcggtggggctcagcgccatcatggcagcgaaattaaccggctgttcgcagattatcgcggtggatatccatgccagccgcctcgccctggcgggcgaactgggcgccacccatcagatcaacggcaaggaacaggatgccgtcgccgtgattaaacaaatcaccggtaaaggcgcccactacgcggtggaaacgaccggcgtctccgctatcgttctgcaggccgtacacgcggtgaaaccgctgggaacggtggcgattgtgggctttaccggagatatcacccttaacgtgcagaacgacctgatggcggagggaaaatcgctggtcggggtgattgaaggcgacgccgtgccggcgctgtttattccgctgttggtgcaactctataaacagggaaaattccctatcgataagcttatcgcccgctatccgttggccgatatcaatcaggccttcgccgattcggcgtccggcaaggtgatcaagccggtggtggtcatgtgagataacgtcgccaccggtcggtggcgacagttgcgcattatgggatttattccagcgtcacgtgatgcttcatcacccggcgaaacagcgccagtctggcgcgcataaagcggttctccactttaaacccggcgcgcttatgcaagccaatgcgcaacaggcgatcccgcccgcgcaggcacgccggccagcgcaccgcgccggaaagcgtctgctcgccgctggcgaggcgggcaaactgcgcccagtagtcagcgacctgagcggcgaaggccagatccgcttcgctggcgtactgccgcaccgggtcggtcaaccgcaggttatcaaacacgtagggcacctcgttgccatgccaggccccatgcgggtaggcgtcatgctccgcttccgcgacataatcaaaccagtagcgccagcacggctgacccacgcgctgttgcgcctgcatcactacataaccaagggtggtgaaggccatgtcgcggcatacttcccgccccagcgattcatcgcccttcacgccgggatagaggagtttgatcagccccagccccagacggcgctctcggcgcagcttctggatctgcccggcaatatcgacgccgaacacggccatcacgctggcttcatcgctattggagccgatcatcaccggtatcggatgctggcggccggcaaagaaggtctccagcatcggctgcggcagcaccgcgtctccggcaataggcgctggcccggtattcagcggcgcggtgagcgaccagaaggcctccgccgggatcgcccgcaattcctcagcgctggcttgcggtaaggcgaagtgttccgccagcaggcgccctttttccagcgctttttcccgcggcagatcgggtagcgtatacccgctctgaataatcgctttatgaaacagccctttcgctttcggggaggccattagcgacagcacgctgcgcgccccggcggattcgccaaacagcgtgacgttggcggcatccccgccgaaggcgtggatattctcctgaacccactgcagagcggcaatctgatcgagcaacgcgaaattatagagacgttcgcccgcctcttcttccagcgccggatgggcgaaaaagccgagatggcccagccggtagttaactgtcaccaccaccacgtcgcggctggcaagcgctttgccatcgtaaggcggcaggctgccggcgccgatggtaaacccgccgccgtgcagccagaccatcaccggcagcggctgcgctgcgctggccggggcccagacgttgagatataagcagtcttcgctgaaggcgccaggatcgccgccgccgagctcgcggcagtagtcaatgtcctgccagctggcggcggaaaaggtctcggctggacgtaccccctgccagcgggcggctggctgcggcgcgcgccagcgcagcgggcccacgggcggcgcggaatacggaatgccgcgccagatatgaatcccctgttctgcgctcccggccagcgttccctgacgggttttcgccaacggtttcgacggatgttgcataacctgctccctgtaaggctgatgccagcagggtactgattttacagcagaccgcaacgtcgtttgctgcgctcctccgcctgtcggtatagttcaaactcatcctgcaccgggcagcccagagctgcctcaaacgcctcgcgactggcgttcccgtggctgcgcgcctgggtttcgttgcccagattggactgaaaaatgcccgccgcgctgaccggtaaaaaatcttcataaataatcggctgggcgaccacccacccgcgctcaatcagcggctgcggatcgtcgcccgggcgaaacgcctggcgatgtgcctcacccgtgggcgtcaggcggtagcgaaaccaggccagcccctgctgacggagcagaaattcgctgtcgggaaattcgctaaacacctcctggagatgctgctggtggctgagattgtctttcccggttcctgccgcctgcagcagccgatcgtacagcgcgcgccctttcggcgtcagcgccacgccccgctgctcaatttcgccaaagcgggcgctatgggtgcctcggtgttctccggcgaacatcaccggctcctcaagcgccttaaagctggtctgccgcaggaggatcgggacctcccggcgcggtggcccttcaatcaacgctttgggttcaataccgcactccggcatcagggactggacgcggtcaatatccagcgtccgcggcgtgagatggttgatatgacaccccgggaaacagaccacatcggcaatcaggcggtgctcgcgatgcagagcatggtaagtctcctcatcgacggtggcttgccggtgccagcggaacgtctccagcgcctcctggacaaactcgcgcgcgtcggcagaggtgaattcgccctctgcttcatactgcgcaatcagcgccaggcagcggggggtgaagattttgcgccgcgcgaggatcgcctcggcccgctcgcgcagggcgcgattttcaatcagctccaggcgcagcagcgaggtgaaaatccgaaatggattgcgcgccagcgcggcatcgtcgatgggacgaaacgccgtggagtggaccggcacgccggcctgcgagagatcgtaatagctaacgggatacatccccatgatggcaaacatgcgacggagcgtcgccagttcttccgctgtgcccacgcgaatcgcgccgtggcgctccacgtttaagcgcgccagctcgtcagcgttagcgagctgttcatgcagctgcggattattttccagtaccgccaggttgacgtcagccaccagctccagcagcgttccgtactgcggaacttcctgctggtacatggccgacatggcctgcgaaaagtgctcccgaatctcatcagccgtgatggtgttcgccatgatgtgttacctccagtgaatacttcctggagtgtaggaaagctgcctcgccgcggggggaagaatttacaaactgtgatggcgataacctgccgccggtccaggtcattgcgcaaaacataacccatagttatgaaaaacacccggtaatttcactttaaattaacaatacatttacacacactgcttctgtcgacattacaacaatatgcccctctaccgtctacacggagtaccctatgaacgacaaatggtccccacgtgaggttgtccatcgcgattacagtagccacccgcccgcttacgcgccgggctataaaaccagcgtcctgcgctcgccaaaaaacgccctcatctctctgcagaactcgctgtcagagatcaccggcccggtatttagccacgacgacctcggccctctggataatgacctaatcctgaactatgccaaagaaggcctgcctatcggcgagcggatcatcgtccacggttacgtgcgcgatggattcggccgaccgatgaaaaatacgctggtggaagtctggcaagccaatgctggcggtcgctaccggcataaaaaagatcagtatctggcgccgattgacccgaactttggcggctgcggccggatgcttaccgatgaaaacggctattactgttttcgcaccatcaaacccggcccctacccctggcgcaaccaggccagcgactggcgtccggcgcatatccatttttctctctcgggcgacgcctgggcccagcgcctgatcacccagatgtattttgaaggcgacccgctgattaagcagtgcccgatcgtcaggactattaagaatgacgacgccgtgcgcacgctgatcgccgagctggacatgcacgccgccgtaccgctggattgtttggcctaccgcttcgaccttgttctgcgcggccaccgcgccacgctgtttgaaaatcgcactcagggggccgcccgatgaaagagtatctgcctgaaaccgcctcgcagacggcgggaccctatgttcatatcggcctggcgccggacgccgcaggctttcatatttttgagaaaaattttggcccggtcctcactaccgccgataccgtcggggagcgcatcaccattgaaggccgggttatcgacggctccgggacgccggtccgcgatgtgctgctggagatctggcaggccaacgccgcgggtcgctataaccatcctgacgatcgtcaacagcagaaagccgtcgacccggccttccgcggctgggggcgtacctgctctgatttcacctccggcatttggcgctttgaaaccatcaagccgggcccggtggccggtcgcgatggccggctgatggcgccgcacgtcaacctgtgggtggtggcgcgggggatcaatattggcctgaatacgcggatgtactttgccgatgaacacgcggccaacgccagcgacccggtgctgaatctcatcgagtgggaggtgaggcgcaaaaccttaatcgccgagcgcgaggttcgcggtacggaagtggtctatcgttttgacattcatctgcagggcgagaacgaaaccgtctttttcgatatttagccgtcgcggtgaccaccaccttcgccccgtttctgcggggcgaaggcgttttcaaccacagggaaagatcttgtcatgtaaccaactcaaatgttaataatattttgctatctggttatcaaatttaaacaagtccgcttgtctctttcaccgctgtgtttttaacatcatcttactatggaaaaaaatggtctcttcagtcagcgcattcgcttgcgccatctacacaccttcgtggccgtcgctcaacagggaacgctggggcgcgcggctgaaacattaaatctgagccagccagcactctcgaaaacgcttaacgagctagaacagctgaccggtacccggctgttcgagcggggtcgtcttggggcgcagctaaccctggtcggcgaacagtttctgacgcatgccgttaaggtgcttgacgcccttaattcggccggccaggcgctgaaccgcaaagagggcctgaataacgatatcgtgcgcatcggcgcgctgcccaccgccgcgctggggatcctgccgacggtgatcggccagtttcacaagcagcaaaaagatatcacgctgcaggtcgccactatgaacaacaccatgctgctcgccggcttaaaatccggggagatcgacatcggcattggacgtatgtccgacccggagctgatgagcgggctgcattacgaactgttgttccttgaatccctgaagctggtggttcgcccgggacatcccctgcttcaggagacggtgacccttagtcgggtgatggagtggccggtggtggtctcacctaaaggcaccgtgccgcggcaaaacgccgaagcgctgctccagagccagggctgtaagatgcccgccggctgcatcgagaccctctccgcctccctgtcgcgccagctgacggtggattttgactatgtctggtttgtcccttccggggcggtaaaagacgatcttcgccgtggcgtgctaaccgccctgccgatcgccacccagggcgccggagagcccatcggcattttaacccgcgtcgatgcgacactgaccccgggtacgcagacgctgctcagcgctatccgtaagtccatgcctgcctgacccccctttctccccggcccgcagcggccggggaacctgcaaacgcgccgacgccgctccccatgacgttagacatattcggcaaaataatcatttagtgcgaaattatttattaacatttgcgcaaacttctttaacagatctatcatgtctcgatttcaccaaatggttcactcgaaatctaatcaagcaacaaatacagttttatgaaggttaaaaccacttcattcaaaaatgattcaaaagcaacatgtttcatttggttcgcagtgaggtggctggtgtggttaaggagattacatggcaactggcaacgcgccggcgcggattcccccggatcctgcagtggcttctcgccggactgatgctcatcatcggtctggctgtgggtattcttggggcaaaactggccctcgtcggcggtacactgtacttcgcgctgatgggcgtggtcatggtcatcgcggcggtgttgattttccgcaaccgccgcggcggtattctgttatacgccgtggcgtttatcgcctcggtgatctgggcgattagtgacgctggctggaactactggccgctcttctcgcgcctgtttgcgctcggcgtactggccttcctggccgccctggtctggcctttcctcgccagcccaccggcgaaaaaaggcccggcctatggcgtcgccgccgttctcgccgtggcgctggcggtgagctttggctggatgttcaaatccgcaccgctggtcagcgcgactgaagcggtaccagtcaagcccgtcgcgccaggcgaacagcagaaaaactgggcgcactggggtaacaccacccacggcgaccgtttcgccgccctcgaccaaatcaacaaacaaaacgtcaaccagctgcaggttgcctgggtagcgcatactggcgatatcccacagagcaacggctcgggcgcagaagatcagaacaccccgctgcagattggcgatactctctatgtctgtaccccttacagtaaagtgctggcgctggatgtggacagcggaaaagagaaatggcgctatgactccaaatcctcttcacccaactggcagcgctgccgcggcttaggctattacgaagatagccaggcgcaaaccgcgccagcggcaggcacgcagccggccgcctgttcccgtcgtctgttcctgccgaccatcgacgcccgcctgatcgccattgatgccgataccggcaaactgtgcgaaagcttcggcgatcgcggtattgtcgacctcagcgtcggcatgggtgaagtgaaagcgggttactatcagcagacctccaccccgctggtggcgggcaatgtggttgtggtgggcggccgcgtcgcggataactactccactggcgaaccgccgggcgtggtccgcgcgtttgatgtccacaccggcaaactggcatgggcgtgggatccgggcaatccagcgctgaccggtgttccgccggaaggccagacctacacgcgcggtacgccaaacgtctggtcggcgatgtcctacgacgcgaagctgaatctgatctatctgcccaccggcaacgccacgccagatttctttggcggcgaacgtaccgcgctggacgataaatacagctcctctatcgtggccgtggatgccaccaccggccaggtgcgctggcacttccagaccacacaccacgatctgtgggactttgacctgccgtctcagccgctgctgtacgatctgcctgacggcaagggcggcaccaccccggtgctagtgcagaccagcaagcagggcatgatctttatgctcaaccgcgagaccggcgagccggtggccaaagtggaagagcgtccggtgccggcgggcaacgtcaaaggtgaacgctactcgccgacgcaaccttactcggtagggatgccgatgatcggcaaccagacgttgaccgagtccgatatgtggggagcgacaccgatcgacctgctgctgtgccgtattcagttcaaagagatgcgccatcagggcgtctttaccccgccaggtgaagatcgttccctgcagttcccgggctcgctcggcggcatgaactggggcagtgtttcgctggatccaaacaacagcctgatgtttgtcaacgatatgcgtctgggcctggccaactatatggtgccgcgcgcgaaggtggcgaaagacgccagcgggatcgagatgggcatcgtgccgatggaaggcacgccgtttggcgcgatgcgcgaacgtttcctgtcgccgctgggcattccgtgccagaagccgccgttcggcaccatgtccgcggtagatctgaaaaccgggaaactggtgtggcaggtgccggttggcaccgtagaagacaccgggccgctggggatccgtatgcacatgccaattccaatcggcatgccgacccttggcgcatcgctggcaacgcagtccggactgctgttcttcgccggcacccaggatttctacctgcgcgcctttgataccgcgaacggcaaagagatctggaaatcgcgtctgccggtcggcagccagtccggcccgatgacctacgtctcaccgaaaaccggtaagcagtacatcattatcaatgccggcggcgcccgtcagtcaccggatcgcggcgattacatcatcgcctacgcgctcccagaccatcactgatcgacatacacaaaagggcccatccgggccctttttttatgagtgacgattcgccttcagcgtcggggattactggtcgccaaagtggatcacggtgcgaatcgatttaccttcatgcatcagatcaaaggcctcgttaatctgctccagcggcaggcgatgggtaataaacggatcgaggcgaattttacccgccatggcgtcttccaccatgcccggcagctgactgcgcccttttacgccgccgaaggcggaaccgcgccacacgcggccggtcaccagctggaacggacgggtcttgatctcctgcccggcgccggctacaccgatgatcacgctctcaccccagcctttatggcagcactccagcgccgcgcgcatcacatttacattgccgatgcactcgaagctgaaatccaccccgccgtcggtcagctcaacgatcacatcctgaatcggcttatcgtagtcgttcggattgataaaatcggtcgcgcccatctctttagcgagagtgaacttatccgggttggtatcaaccgccagaatgcgcccggcctgtgcctgcaccgcgccctggatcaccgccagaccaatgccgcccagaccaaagaccgcgacgctatccccggccttgaccttcgccgtgttatgcaccgcgccgataccggtggttacgccgcagcccagcaggcacactttatccaaaggcgcctgcggattgactttcgccagcgaaatctcggcgcaaaccgtatattcgctgaaggtgctggtgcccatatagtgatagatcggttcgccattgtacgagaaacgagtggtgccgtccggcatcagccctttaccctgggtggcacgcaccgcctgacagaggttggttttacccgacttacagaatttgcactcgccacattcggcggtatacagcggaatgacgtgatcgcccggcttaaggctggtgacgccctcgcctacttccacgacaatcccgccgccctcatggcccagcaccgccgggaagacaccttccggatcgtcaccggagagggtgaaggcatcggtatgacacaccccggtgtgggtgattttcaccagaacttcgccttttttcggcggcgcgacgtcaatctcaacgatttttaacggctgaccggggccgaaggccactgctgcgcgtgatttcataactgtctcttcctcgtcgtgatgttattttaaataggatcgtagcagatgaccgacctctgccattctcgcggcccgctgctcaggggtggtgtcgccgctgaccagctcgtcctgcaggtggatctccaccatttcgcccatcaggccgttcgccgccccgcgaatcgaggcgatctgctgcagaatagtcatacagggctcgccggactccagcgcgcgctcaagggcttcgacctggccgcggatgcgtcttacgcggctgagcgcccgttttttatcttcaggtgaatgtggcacgattacgcctccgtatcatataggggggtatactatattctattagcggtgaaggcaaaaaaaaccccgtcgcgggacggggtcaggaagtgaaagaggatgatttagcgcttacgaggcatcattcgcagcagagtattatccttccaccagtaatgatggagcagcgcggcgagagcatgcaggccaatcacaaagtacccggcattggccaaccattcatggatcgccttcagggtatccacccgctcaaaatcgctctgcggggcatacggcatggtcagaccaaaggcataccaggggttaccgcgccagtacatcatcaccatgccgatcaacggcaaggcaatgaacagcaaatagatcgccaggtgaccaagatgggcgaaaccggtcatcatcggcgatggtttcggtacgatcggcggcgccggcgatttcagccgcaccagcagacgcgccaccatcagcacgaaaatggtgatcccgcaggaaacatgcaccatattaatcaatggccgttcactgcgggggaaaaacccgcgcagctccatcgccgcataggctactactaccagcaaaaaaaccagccagtgaatcccaatctgcaggccggaatatttatcgcgcatggcatatcctttatggaaagtatgatgctgccaacatagcggcgttcccttaaattttcattaacctttacgtagaattaacaattgattaccgctttctgccgagccgctatgccacgcttagcgcacgctctttcctggccgaacgacaaaccgtccaccggtcattacaaaattacacagttttgttacttaccgcgctactgccgccgctatagtacagaatgtctggcagaccacacggccctgggagataagaatgaaggaaatcggcttaccgttattgctactgaccgcgctggccagtccggcttttgctgcagactgtcagccaaacggcattggcggctctttttgcattaacgatgacggtacgactaccgacacggtgcctaacgaagtcaacggcatggatacgtactcgaataatggcggctataccagttccctgcccgatcggtcaggggcggatgaagcactggaaggttcatcgctgtcgacgcagcaaggcgtcggcagcggacagagcgacagtgcgctggcgggtcgcgactggcattcgcccgccaatctgaatgatggcgccgccacctccagtatgagcctgctggataaaccctgaggccagcggctaagcgagactccagcctgcggcgccgatggcgagggcgaaaagcaggcaggccagcgccgtcttgcgtaacagcatggtatagaatgaaattgcgacgccaatgaataccaccagcagaatcggccacatgcttaataacaacagcagaaaaccctcaatattgttatggattacgctctccacatccgcatccttgcctcatcgtcgataaagtaagcagaatttaatatgtaacatgaatacattcaaataaaatataattgtaaatggttatgcaccgcctcctgcggttggcggtgggtcactttcacgcgtccggagctttggcatcaaaagcagttcgcaaaaaacacgtcaggattgttccatgaccctttagcggtacgctcgtattctcgctggtatcctgcaaattcttcacgccattattcggcgcgggtatctgacacaatgcgccggcgatgacagtcgcctggttgcagtttatccccctgagcggaacgcacatccagatactgaaggggctggccgtgcgcgttatccagcaggaccgaataggtttccccttgctcaaacatataacgctctccccattgccgcagcgccacaacaatgggaaacacggagcgccccttttcagtcaggacatattccttgtatgcgctgccatccgatgccggtaaaatctcgaaaataccgatatcaaccagatgcttcagccgcgaggcaaggatatttttggccagccccaaatttttttgaaactcgctgaatctccgcacatcgtcaaatgcttcgcggataatcatcaggcaccagcgttcaccaattgattccaacgttctcgccaccggacattcactggttctaagtgattcctgctttgccatctgcgcgctccttatcaatttatctactgatctagcttaatcctcacctttaccagttgcaaaaaaaaaccagcaaggctaattctataggtacactagttttaaaaagcaaccagacagagggtctcttatgaaatgtaaggcaagtagatgtaccggccaaaagatccaaactgcgtcagtccctgacacgatgctgaccacagggataacggcgttgttttcactaacctgcgcgctggcagtagccaatgtttattcagcacagcctttactcgactcgatggcggtcagcctgaaggtgtcgccaggcatgattggcagcgtcatcaccgctacgcaggcgggctatgccattggcctgctgttcctggttccgctcggggactggttgaaccgtaaatacgtggtgatgagtcaactgttgctttcagtagcggcgttagtcgcggcagggttatcccccaatatagtaactctgcttggcgccatgctgatcgtcggcctgatggccgttgtggtgcaggtgctggtggcctgggtggcaatactggcgacgccgcagaaacgaggccaggcggtgggtaccctgaccagcggcattgtttcaggcatcctgttatctcggtttatctcaggcgcgatagccgatatcgccggctggcgagccgtgtatctcacggctgcctgtctgatgttgatgattgccgggatcgtctggaaaatcatgccttcgcccccgcagcagccgcagccgcaaaagccgacttacctttccttattgaagtccgtgtttcagctgtacctcaccgagccgcaactgagaaagcgcgggatcctggcgctatttatcttcgccgctttcagcatgctatggacgaccatggtcatgccgctcaccgccctttccctctcgcacacccagacggggatgtttggcttagccggcttcgctggcatgctggccgccgccagagcgggcaagtgggctgaccagggatgggctcagcgcactaccggcctggcgctggcgctgctgaccatctcatggcttcctatcggctatgccgaaacctctctgctttggctgatagctggcgtcattgcgctggactttgcggtacaggccgttcatgtctccagccagagcctgatcattgccgccaggcctgcagcggcaagccgcctggttggggcttacatgtgtttttattcgctgggcagcgcggcaggggctatcgttgccacacagctttattcccactggggatggcaggcggtctgccttgcgggcgccgcggtcagcgcgtgtgcatttctgatctggtcaggatcgcgtcaatcatgatattcgttctgcgttttaaaggggccagtcaaaaagaccgtaacactgacctgattgctgccagctatttgtatcgcatacattttttcaatgcttttaaacagttatgttcatgttgtataatgacgtgcactttaactaaaaaaagagtgcgaccatgattgattcctcattgccattaaccgacattcatcgtcatcttgacggtaacatccgggcccaaaccatcctcgatcttggccgcgaatttaatatcgctcttcccgcaaccaccctcgacacgctgcgtccgcacgtccaggtcaccagccttgagcccgatctggttagtttcctcgccaagctcgactggggggtaaaggtcctggcctcgctggaagcctgtcgccgcgtggcgtatgagaacgtcgaagacgcggcgcgaaatggcctgcactacgttgagctgcgcttctctccccgctatatggcgatgacccaccggctgccggtcgacggcgtggtagaggcggtaattgccggggttcaagagggatgccgcgatttccaggtcgacgcccggctgatcggtattctgagccgcaccttcggcgaagccgcctgtcaggaagagctggcggcgctgctcgcccaccgcgagggcatcacagccctcgacctcgccggcgatgagctaggcttcccgggtacgttgttccgcaaccattttaaccaggcccgcgacgccgggtggcatatcaccgtccacgcgggcgaagcggccggcccggaaagtatctggcaggccattcgtgagctgggcgcggagcgcatcggccatggggttaaagcggtagaggatccagccctgatggactacctggccgagcaccgcatcgggattgaatcctgcctgacctcgaacgtgcaaaccagcaccgtggcctccctggcccagcatccgctgaagcagttccttgagcacggcgtgctggcgagcctcaacaccgacgatccggcggtccagggtgtggacatcattcacgagtataccgtggcggcgccggcggcagggctgagccgggagcagatccgtcaggcgcagatcaacggcctgaccctggcgttcctcggcgaacaggaaaaagccgccctcattcagcgggttgccaaaggctgataaccggcccggcagccgtgctgccgggctcctcctcagaccaggctgagcgtggcgcgatgtctggccgactcgatacccaactcaatcagggtcattatctgaatcgcctcgctggccgggaccgggttttcccctacgccgttaagcgcgtcgcggatagcggcatagtaggcgggataattacccggtagcgtcagccatttctcctgactacgttcatccccttcggcgcgggtcagggtaccgtcgcgcatatcatatccccagtcctcctgcggcagccgttcaccgttttttagccgctcctcctgcgggtcaaggccgtacttaatatagctggcccgcgagccgtggacgataaagcgcgcgctctccgcggcggcgagtaacgtaccatgcagtactacccgccgctgcggataggccagcacggcgtgaaaatagtcggtggattgcgcgccgggccgaagctgcgcgaggtccaccgtgatgcttaccggcaggccaaacagcaccacgacctggtcgagcagatgcggcgcgaggtcataccatatgccgctgccaggacccgcctgctcacgccagcgctggcgcacctgtggtcggaagcgatcgaaatgcgactcgaagtaacacacctcccccagctgaccttcgttgatcaacgcgctgaccgttaagaaatcgctgtcccagcgccggttatgaaacaccgaaagtatccgaccgcagtgcttcgccaggctttccagctcgcgagcttgtgacaatgtcacggtaaatggcttatccaccacaacatgctttcccgcctccagcgccgctttcgccagcggaaagtgggtgtcgttcggggtggcgatgaccaccagatcgatatccgggtcgtccagcagatcccccggcgcactcattaccttcacgccaggccaatcggcatggaccttatcggcgtcgctgctggcgaccgccttcagcgccatacccggcgtgccgccgatcaacggcgcatgaaacgttttgctggcgtaaccgaaccccaccagccccacccggatcgcatcgctcatcttaccgcctcgcttatgcaactgatatcaacaccaggttaatgagaataattttacaaaccgtgagcaaaacttatcattccttactttgcgacttacatgcaagtgtgagaaatcagacagataccccttgtgatctgctgaccatcgagtaacatttcacgctgtgttcaaaggatattgaagtgttatgacaactgtttttacccgtattgtagaacttattggctggattgtttttggtatttcggcactgcttttggttatcgcacaccatatagataactatcagtccccaccgccagcggatgtggtgcacacgaagtagctccgcgttaaaacagtgacccgcctcgcaactgtgcaaccggtttcagaaaccggttgcacgtatgctcgcgcttttattacactccctttatcatcagacagggagctttttcatggccgcttttccgcacaatttcttatggggtgccgctaccgcagcgtatcaggttgagggaggacacgacgccgacggtaaaggaccgtcaatctgggatatctactctcatctgccgggtaccacctttgaaggcaccaccggcgatattgccgtcgaccactatcaccgttttcgcgaagacgtggcgttaatggccgaaatgggcctgcaaagctatcgattctccatctcctggccccgcctgctgcccgccgggcgcggtaaggtgaatgaagcgggagtccagttttacagcgatctgatcgacgaactgctggcgcacaatattgagccgatgatcaccctctatcactgggatctgccgcaggccctgcaggatgagggcggctgggaagcgcgcactaccgccgaggccttcgccgagtacgcccgcctgtgctatgcgcgctttggttcacgggtgaagctgtgggctaccttcaacgaaaccattgtcttcattgggcacggctacattaacggcctccatcccccggcggtccgcgatccggcgcgtgctattcaggcctgccaccacgtatttatcgcccatgcgctggcggtgaaggcctttcgcgagatggctgtggccggcgagattggcttcgtcaacgtactgcaaccgcataccccgctcaccgacagcgaggcggacattaaggccaccgaactggctgacgccatccatactcactggctgtacgatccggtgctgaaaggcacctatcctgccgacctgctggcgcagacccaggcgctgtggggggtacctcgctttgctccaggcgacgacgcgctgctccgtgacaaccgctgcgactttatcggtctgaattactatcgccgggaaacggtatctgcccagccgcctgagatcgctaccggcggtgagcctggcgtggagggattattctatttcgtgcgtaatccccagagtacatataccgaatggggctgggaaatctggccgcaggggctaactgacggcattatgatgattaaggcgcgctatggcgatattccgatatatatcaccgagaatggcctcggcgcgaaggacccgattattgacggggaagtggtcgacgacccgcggattgattatctcagcagccatattggcgccctcgaaaaagcgctggcgctgggggcagatgtgcgcggctattacccctggtcatttatcgatctgctgagctggctcaacggctatcaaaagcaatatggttttgtctatgtcgatcaccagcaaaatctggcgcggaaacgaaagaagagtttttattggtacaaatctgttattgccagtcacggcgaacagcgttaatcttctcttgcgggcgccattcggcgcccggtctgattttagaatattcttaaacttctccctgctcttcaaggctggctttgccccttgtcatgggtttatataacctgattcattccacgcggccccagcagaaggcgccgttggttgagagtaggtttagtgaatgctgataatattcaacgcaataattccgattataaaatggatacgaaaatgaccgtgctggactacttattaaaatttcgcaaaatcagttcgctggaaagccttgaaaaactatttgatcaccttaactactccctgactgacacccaggagatcgtgaatatgtatcgcgccgccgatcatcgtcgcgcagagctggtctccggtggtaaattgttcgatgtgggccaggttcctaaatccgtttggcgattcgtgcagtaaggctgtcatccttcacgccagttgcttatacttcccggcctgattttattcactggcgttgaataggggagaaacatgacgtctcaatctgcagagcgcatcggcggatggctgctggctccgctggcctggttgctggtggcgctgctgagtgcctcgttatcgctgctgttttttgccaatgcgctgatgtcgccgcagacctataccctactgcgcgccatgagcgcgggccatatggcgctgtgggtcgcctcgctgctgtttgccctcgccatgtggtattacacgctctggctgactatcgcctttttcaagcggcgctcggtggtgccgaaacactatattatctggctgctcatcaccctgctgctggcgataaaggcttttgccttctcgccggtctcggatgtgcttgccctgcgtcagctgctgtttccgctgctgggcgctgcgctgctggcgccctattttcgccgttcgcagcgggtaaaacggacttttgttaatccgtaatacccccacacttaacctgttgtcgctggtatcgttttattcgataataagcggctttttttcgtttcaggtcgcatgatggctgattatttactgctctttattggtacagtcctggtcaataacttcgttctggtgaagtttcttggtctgtgcccgtttatgggggtttccaaaaagctggaaaccgcaatggggatggggctcgctaccaccttcgtgatgaccctggcctctatttgcgcctggctgattgatacctggatccttatcccgctaaatttggtttatttgcgtaccctggcctttattctggttatcgccgtggtggttcagtttactgagatggtggtgcgtaaaaccagcccggcgctctatcgcctgctggggatctttctaccgctgatcaccaccaactgtgccgtactcggggtagcgctgctgaatattaatctgggccacaatttcctgcagtcggcgctgtacggctttgccgccgccgtcggcttctcgctggtaatggtgctgttcgcggcgatccgtgaacgcctggtggtggccgatgtccccgcgccgtttcgcggtaatgccatcgcgctgattaccgccggtttaatgtctctggccttcatgggctttagtggtttggtgaagttgtaatgagcgcagtctggatagccgtgatcgccatcagcctgttagggctgattttcggcttaatactgggatacgcctcgcgtcgtttcgcggtgcaggacgacccggtggtggaaaaaattgatgagctattgccgcagagccagtgtgggcagtgcgggtaccctgggtgtcgcccctatgcggaagcagtcggcgtgcagggtgagaaaataaaccgctgcgcgccgggtggcgaagcggtgatgttaaaaatcgccgccttgctgaacgtcgacccgcagcctgtcgacggcgacgcacaggaagcggagccggcccgcatgctcgcggtaattgacgagccgaactgcattggctgtaccaagtgtatccaggcctgtccggtggatgccatcgttggggcgacccgcgccatgcataccgtgatgagcgacctgtgcaccggctgcaatttgtgcgtcgccccctgcccgacccagtgcatttcactcgttccggtggccaccaccccggagacctggaaatgggatctgcatacgatcccggtgcgaaatattcctgtggaacaacatgtttaagctattttccgctttccgaaaagacaaggtctgggatttcaacggcggtattcacccgcctgaaatgaaaacccagtctaacggcaccccgctgcgtcaggtttccctgccgcagcgctttgttatcccgttgaagcagcacattggcgccgagggcgaactgtgcgttaaagtgggcgaccgggtgctgcgcggccagccgctgacccgcggctggggaagaatgctgcccgttcacgccccgacttccggcaccattgccgccatcgctccgcacactaccgcgcacccgtcggctctggcggagatgagcgtgatcattgacgccgacggcgaagaccgctggatcgagcgcgatggctggagcgactatcagacccgcacgcgtgaagcgctgatcgagcgtatccaccagtttggcgttgctggcctcggcggcgcaggcttccccaccggcagtaaactgcgcggtggcggagataaaattaaaacgctgatcattaacgccgccgagtgcgagccctatatcacggcggatgaccgcctgatgcaggactgcgcggcgcagattgtcgagggtatccgcatcctcgctcatatactgcagcctgaagaagtgctgatcggcattgaagacaataagccgcaggccatctcaatgctgcgggcggtgctctgcgacgcccatggcatttcgctgcgcgtgatccccaccaaatatccctccggtggcgccaagcagctcacccaaattctcaccggcaaacaggtaccgcacggcggtcgttcatcggacattggcgtgctgatgcagaacgtcggtacggcttatgcggtgaaacgcgcggtgattgacggtgagccgttaaccgagcgcgtggtcaccctcaccggcgaagcggtaaccagaccgggcaatgtctgggcgcgtcttggcacgccggtgcgccatctattgaacgatgccggcttctgccccagcgccgagccaatggtgatcatgggcggcccgctgatgggctttaccctgccgtggctcgacgtcccggtggtgaagatcaccaactgtttgctggcgccttccgccaacgagatgggcgaaccgcaggaagagaaaggctgcattcgctgcagcgcctgcgctgacgcctgcccggccgatctgctgccgcagcagctgtactggttcagcaaaggtcagcagcacgataaagccactgcccataatctggcggactgcatcgagtgcggcgcctgcgcgtgggtatgtccaagtaatattccgctggtgcagtacttccgtcaggaaaaggccgagatcgcggcgattcgtcaggaagagcagcgcgctgcggaagccaaagcccgattcgaggcccgacaggcgcgcctggagcgtgagaaagctgcgcgcgccgagcggcataaaaaagccgccgttcagcctgccgccaaagatcaggaggcgattagcgccgccctggcccgggtacgggataaacagcgcgatgccgcgcagccgatcgtgatccaggccggcgccaaacctgacaacagcgaggcaattgccgcccgcgaagcgcgtaaggctgaggcccgggcgcgcaaagcgcagcagcaggacgccccggccgccgaaccggtcgacccgcgcaaggcggcggtggaagccgccatcgcccgcgccaaagcgcgtaaagccgaacagcaggccgcgccggtggaagccccggccgccgaaccggtcgacccgcgcaaggcggcggtggaagccgctatcgcccgcgccaaagcgcgtaaagccgaacagcaggccgcgccggtggacgccccggccgccgaaccggtcgacccgcgcaaggcggcggtggaagccgctatcgcccgcgctaaagcgcgtaaagcagaacagcaggccgcgccggtggacgccccggccgccgaaccggtcgacccgcgcaaggcggcggtggaagccgctatcgcccgcgccaaagcgcgtaaagccgaacagcaggccacacaacaggatctcgcgtcagccgcagccaatgacgacccgcgcaaagcggccgtcgccgcggctatcgcccgcgttcaggcgcgtaaagcaacacagcaggcagttaacgaggaataaatggttttcagaatcgcaagctccccctatacccataaccagcggcagacctcgcgtattatgctgctggtgctgctcgccgctgtgcctggcattgtggtccagacctggtttttcggctggggcaccgtactgcagattgtcctcgccgccctgacggcctgggcgaccgaagccgctattctcaaactgcgtaaacagcctgttgctgccacgctgaaagataattccgccctgctcaccggcctgctgctggcggtgagtattccgccactggccccgtggtggatggtggtgctcggcactgcctttgccgtagtcattgccaagcagttgtacggaggcctgggccataaccccttcaacccggcaatgatcggctatgtcgtgctgctgatttcgttcccggtgcagatgacctcctggctgccttcctatgagatagccgcccatatcccggcattcagcgacgcgctgcagatgatcttcaccggtcataccgccgccggaggcgacatggccagtctgcggctgggtatcgacggcgtcagccaggccaccccgctggatacctttaaaacctccctgcatgccggacatagcgttcagcaggtgctgcaattgccggtctacggcggcgtgctggcaggtctgggctggcagtgggtgaatatcgcctggctggcaggcggccttttcctgctgtggcagaaggcgatccgctggcatatcccggtcagcttccttgttagcctcggcctgtgcgccaccctcggctggattttttcgccgcagagcctggcctcaccgcagatgcatttgctctccggggcgaccatgcttggcgccttctttatcctgaccgatccggtgacggcctcaacaaccaaccgcggccgtctgatctttggcgccctcgctggcctgctggtctggctcatccgcagcttcggtggttatccggacggcgtggcgtttgccgttctgctggcgaatattaccgtgccgctgatcgattactacacgcgcccgcgcgtatatggccaccgttgagagagcaatgatgttaaaaacgatgcgtaaacacggcgtcacgctggcgctgtttgccgccggttccaccgggctgacggcggcgatcaatgagctgaccaaaagcaccatcgaccagcaggcggccctgcagcaaaaggcgttattcgaccaggttttacctgccgaccgctataataacgatctgcttaagagctgctatctggtcagcgccccggcgctgggcaaaggccagcataaagtgtggatcgccaaaaataacgatcgaccgatcggcgcggtgatggaagccaccgcgccggacggctactccggagcaatacagctgctggttgccgccgattttagcggcacggtcctcggcacccgcgtaactgagcatcatgaaacgccgggcctgggggataaaatcgaacttcgcctgtcggactggattacccattttgccgggaaagtcatccacggccagggcgatagccactgggcggtcaaaaaggatggcggcgattttgaccagttcaccggcgccaccatcaccccccgggcggtggtcaatgccgttaagcgcgcaggcttatatgcacaaacgctgcctgcgcaacttcctgaattcaccgcctgtggagaataaccatgagcgaagttaaagacgtcatcgtccagggcctgtggaaaaataactccgccctggttcagctgttaggtatgtgtcctctgctggcggtcacctcgaccgccaccaacgccctcgggctgggtttggccaccaccctggtgttaaccctgaccaacctgaccatctccagcctgcgccgctggacgccggcggagatccggatccccatctacgtaatgattatcgcctcggtggtgagcgtcgtgcagatgctgatcaacgcctatgccttcggcctctatcagtcgctggggattttcatcccgcttatcgtgaccaactgcatcgtggtcggccgcgccgaagcctttgccgccaaaaaagggccggcgctgtcggcgctggacggtttctcgatcggcatgggcgctacctgcgcgatgtttgtgctgggctccctgcgcgagatccttggcaacggcaccctgtttgacggcgccgacagtctgcttggcagctgggcgaaggttctgcgcatcgaggttttccacgccgacacccctttcctgctggctatgctgccgccaggcgcctttattggcctcggcatgatgctggcgattaaataccttatcgatgaacgtagcaaacagcggaaggcgcaagcggcccgggccgtctctgtcgccccgtccgacgtgacagggaaagcataatatgaacaaagccaaacgcctggcgatccttaccaggctgcgggaaaacgatccccaccccactaccgaactgcatttcagttcgccgttcgagctgctgattgccgtcctgctttctgcacaggccaccgacgtaagcgtcaacaaagcgacagccaaactctatccggtggccaatacgcccgcagcgatgctggccctgggggtggatggggtaaaatcgtatatcaagactatcggcctgtttaacagcaaagcggaaaacgtcatcaaaacctgccgcatcctgttggagcagcacaatggtgaggtgccggaagacagagcagcgctggaggcgctacccggcgtgggccgtaaaaccgccaacgtggtgctgaataccgcctttggctggccgaccatcgccgtggacacgcacatcttccgcgtctgcaatcggacgcagttcgccccgggcaagaatgttgaacaggtggaagagaagcttctgaaggtggtccccgccgagtttaaggtcgactgccatcactggctgatcctgcatgggcgttatacctgtattgcccgcaagccgcgctgcggctcctgcctgattgaagatctttgcgaatacaaagataaagtctacgcctgactgtctcgtctctattgcggtcatagcttaactctgggttatggcccgcattcatctatttcaccggccattaacaccacataatcatcatgattatggatgattatccggttatataacaaacaactagttcattcattttttatcagcgcaaaatttctatgcatttgtgatccagatcatgctcgcaactttatgttgaatgaatgttactggaatggaaataaatgtcaggcaatacaacggatgagtaaagattgtcaggataatgacccatgattttttaagataatggaccatatcactatgcttacgccagatcagtagaatatatcgccttttcccgacaaaccggcgaacccaaaagataaaaataccaacgatatcgaaacggtaaaatttaacgctgtataacattcatatgtccggagcattataccaccctgattatgtgtaacagattattacaaaagccttgcctgatgcgccaggatagtgaacattacttgccgttttccctccaagaataactataaaggcggcggtccaacgagattgcgccccgaacaccccccagtaaatatgggatgtaaaaaaagaggtatatgtgtctactgcaaacaataaaccagcagaaagcgtgagtctgaacgctttcaaacaaccacgcgcgttctatctcattttctcgatcgagttgtgggagcgttttggttactacggcctgcaagggatcatggccgtttacctggtaaaacagctgggtatgtcggaagcggattccattactctgttctcctcctttagcgcgctggtttatggcctcgtcgccattggcggctggctgggtgataaagtgctgggtaccaagcgtgtcatcatgctgggcgctatcgtgctggcgattggctatgcgctggtggcctggtccggtcatgacgccgctatcgtctatatgggtatggcgaccatcgccgtcggtaacggcctgtttaaagccaacccgtcctccctgctttctacctgctatgacaaaaacgacccacgtctggacggtgcatttaccatgtactacatgtccatcaacatcggttcgttcttctctatgctggcaaccccgtggctggccgcacgttttggctggagcgtagcgtttgccctcagcgtggtggggatggtgatcaccattattaacttcgccttctgtcagaaatgggttaaacagtacggctctaaaccggactttgtcccggtacacatgggtaaactgctggcgaccatcgctggcgtggtggtgctggtcgctatcgccacctggctgctgcacaaccagggtatcgcacgtatggtgctgggcgtcgtcgcactgggtatcgtcgtgattttcgccaaagaaaccataggcctgaaaggcgctccgcgtcgtaaaatgatcgtcgctttcctgctgatggtagaagcgattgtcttcttcgtgttgtacagccagatgccgacctcgctgaacttcttcgccatccgtaacgtggagcactcgatcctcggtctcgcctttgaaccggaacagtatcaggcgctgaacccgttctggatcatgattggtagcccgattctggccgccatctacaacaagatgggcgaccgcctgccgatgccgcacaaatttgctatcggtatggtactgtgctctggcgcattcctcgtcctgcctttaggggcgaagttcgccagcgacgccggtatcgtctcggtcaactggctgattctgagctacgcgctgcagtctatcggtgaactgatgatttccggcctcggcctggcgatggtcgctcagctggttcctcagcgtctgatgggcttcattatgggcagctggttcctcaccacggcaggcgcggcgatcatcgccgggaaaatcgctaacctgatggcagtcccggagaatgtcaccgatccgctggtgtcgctggaagtgtacggtcacgtattcctgcagattggtatcgtcaccgcggttatcgccgccctgatgctgctgaccgcgccgaaactgaatcgtatgactcaggacgacagcgcggacattaaagcacgcgaaaccgcggctgcctgacgccgcagggaaaactaattatttttaagccgctaacgttagtttagcggctttttttttacccctggcaggactaacatacagaaaactgcagccacgaggagtcacgcatgaaactgttctacaaacccggcgcctgttcccttgcctcgcatattgccctgcgcgaaagcggtctggattttaccctgcagagcgtggatctggcccaaaaacggctggaaaacggggaagactatctgctgatcaacccgaaaggtcaggtgccggcgctgctgctggatgatgatatcctgctcactgagggcgtagccatcatgcagtacatcgcagaccaggtgccggatcgtcatctgctggcgccggtgggctcgattgcgcgctatcagactctcgaatggctgaactatgtggccaccgagctgcataaaagctttaccccgctgttccgcccggataccccggaggactataagcctgtcgcgcgggggctgcttgagaaaaagctgcaatacgttgatgcagcgctggcagacaaacagtggctgaccggccatcgcttcaccattgccgatggttatctgtttacggtgctgcgctgggcctatgctataaaattggatatggctgcctatggtcatatcggcagctggatgacgcaggtggcagcgcgtccggcggtggctgccgcactggcggctgaaggcttaaaataaggcctgaacctgcccggcggaccgtcggcaggccctgggagttacagccgggtggcgctgaagcagtgctccggtacggcgatgcgatcctgcgccgctactacctgcagttcgtattcctgcatatttttggtggcgagcataatctcgtacaccgcggcggtgacgtgttccagcgcatcgcgcagacttgccccctgcagcaatttaaccaacagcaaaccgctggttacatcgccgacgcccaccggctgacgcaggccgaaatccaccagcggccgactaatatgccaggcttcttcggccgtcaccagcagcatctcaaaacgatccatactcagacccgcacgggcaagatgcttaactaataccacttccggcccctgggcaatcagctcccgcgcggcggccactgcttcgctgacgctggcgaccggatgaccgcacaggatctccagctcaaccagattcggggcaataatatcgctggccggcagcgcatagcgcacgtggaactccgccacgcccggcgcaacgatgcagcccttctccgggtgacccatcaccggatcgcaaaaatatttcgccgccggattggccgccttaacctgacgcacgataccgaggatatgctctccctgctcagcggagccaagatagccgctcagtaccgcatcgcaggtctgcagcttgtcgatatcggcaatcccctgaacgatctccgtcaggtgtgaaggcggcatgacgcagccggtccatttgccgtactgcgtatggttagagaactgtacggtattcaggggccagacattggcgcccagacggcgcatcggaaattcggcggcactgttgccggcatggccaaacacaacgtgagactgaatggcgaggatgttcttcattttcttaccacaaccctaaaaagaaaaagggcgtggtttcccacgccctggcagtatttttttatttccagcagaccaggcagtaatttttcttaccgcgacgcagcaaggtgtagcggccaaacaggcgatcgctgtcactgaatacatattccgggtcggcctgtttttcgccgttgatggtcaccgcgttagaggcaacggttttacgcgcctgaccgcgggacggctgcagctcggaatcaaccagcgcctgcagcagatcggcgcctttttccatttcgatcatcggcacgccatcctgggccagctgttcgaagtctgcttcgctcaggtcgctcaggttaccgttgaacaggctttcggtaatgcgcttcgccgcttccaggccttcttcgccgtgaacaaggcgcgtcacctgctctgccagcacgtactgggcgcgcggcgctttaccgctgtttttgtcttcttcttccagggcattgatctccgcaatgtccataaaggtgaagaatttgaggaagcgatagacatcagcatccgcggtgttgatccagaactggtagaatttgtacggactggttttcttcggatccagccacacggcgccgccttcggttttaccgaatttggtgccgtccgctttggtgatcagcggtacggtcaggccaaacacctggttctgatgcagacgacgggtcagatcgatgccggaggtgatgttgccccactggtcagaaccgccaatctgcagcgccacgccgtgcagcttattcaggcaggcaaagtcgtaaccctgcagcagattgtaagagaactcggtaaaggagataccctgatcgtcacgattcagacgctgcttcaccgcttctttgttgatcatctggttaacagagaagtgtttaccgatatcgcgcaggaaggtcagcacgttcatgctgccaaaccagtcatagttattcgccgcgatcgccgagttgtcgccgcagtcaaaatcaaggaacggagccacctgtttgcggattttatccacccactcctgcacggtatcttcggtgtttagtttacgctcagcggctttgaagcttgggtcgccaatcagaccggttgcgccgcccaccagcgccacaggtttatgacctgcctgctggaagcgtttcaggcataacaatggaacaagatgccccaaatgcaagctgtcagcggtaggatcgaagccgcaatagagcgcgatcgggccttgcgccagtcgctctgctaacgcttcctcgtccgtcacctgggctaccagcccccgctcttgcaattgtttaatcaagttactgcttgccatcaaattctccatgtataaacgactgcacctctgccggtacacgacttttcgccagatgcgaaaagtacatagaataaagcgccggccctttcagcgccagcgcttcgataactaatttcggcgtttacggcgccagacggtctattttccaggcgccgctatcgcgctggtataaaaagcgatcgtgcagacggtgttctcccccctgccagaactccatctgctcaatgctgacgcggaatccgccccagaagctcggcaacggcacttcaccctgctggaacttctgcttcagctcgaggaatttgctttcgaggatgccgcgggctgagatccggctcgactgcttcgagacccaggcgccaatctggctgtcgcgcggacggctgtggaaatatttgaccacttccagcgtcgacagacgctccgctttgccgattaccatcacctggcgctccagcatatgccacgggaaaagcaggctgacctgcgggttgttttcaatttgatgcgctttgcggctgccaaggttggtataaaacaccaaccctttttcgtcgtagtgcttcagcagcacaatgcgctggtagggctggccgcgctcatcgacggtggcgaccaccatggccgttgggtcggcaagtttcgcatcgcaggcctgacgcagccagcgttcaaacagcggcaggggttcagcaggaagatcgtggcgacgcaaaccgccacgggtgtattcacggcgcaaatgcgcaatttgctggagttcgtcgttatcagacatggccattgaggatgtagtcataaggtggcgttattgtgcgccccccggacagaaatctcaacgtttggccgtctgcagctgacagttatcaaggacgatgcggtcgcgcttatagacggtggcggtatcgccttttgaccagaacacatagacgccgtcggtgtagcgcgccccggaagccgacagcccctcagacaggttcagttgctgattatcatagataaaactgacctgctggcgtgcgttattgcgatggaccgtcaatggtttctggtcgcattgatactccagcgtgtccgtctgcatccgctcgacaaactggttgtagtagctacagcccgccagcataaaaggtacaactgcgataagaatttttttcattcgtttgccttcgactttcccggtcacggcgggcactccgccctccgcttaacttgtccagtttaccggtcgcgtcgtatttaagatttcagttaactccgattctgcggcgggttagccggaaaaatggcgcccagcaccgaggcttcgctggcgccggtcacggagggcagattgcccggcagaccagccagcgttcgccaggccagccaggcaaaggccagcgcttccatatcatcgccgctgatccccgcctcatcggtggtggagacctcggttcccggcagcagcgccgccaggcgcgccattaacaaggggttacgcgcgccgccgccgcacactaacaaacgctcgcagccgccgcttaacaatacctgctcactgatggtgacggcggtcaattccgcaagcgtagcctgaacatcctccccgcgtagccccggatagcgggccatatgctgctccagccagccgtaattgaaatattcccgaccggtgcttttcggcgccggcaaggcaaaccacggatcgctcagcatgtcctgcagcagcggcagcagcactttaccttcgctagcccattgggcgtccttgtcgtacggtttgcccttctggcgccagatccaggcgtccagcaacatatttcccggcccggtatcatagccgcgcaccggctgacctggcgccagcagcgacacattagcgatcccgccgatattgagcaccatacgtcgctcaacggggtgggccagcagcgcatgatgaaaagccggcaccagcggcgccccctgcccgcctagcgccatatcccggcgacgaaaatcccccactacggttatcccggtgtgggcggcgatctggttgttatcaccaatttgcagggtatgcggagcctctccctgcggttcatgccatacggtctgtccatggcagccgatggcgatgacgtcggtgggtttgagactttcctggcgcatcagcgccagtacggcatcggcaaacagccgtcccagacgggtgtccagacgacctagctgcgaaagggtcagcgactgcccctggcaaatcgccagaatctcttcttttatcgcgtgtggaatgggccaggtgagactagcctgctgcgccaccatgttttcagtaatggtggccaaaacgacatcgataccatccaggctggtaccagacataacgccaataaagcgacccgatctcatacgttttccttcattccatgacccttgtatgccctcactccatcataaagtgtcggctaatgctatgttgtactaatactttttaacaatagagcgacaaatcagagaacatcgtaaagaaccggcgtttagttgaggttgaagcaccagtgtttattattttttgtatagtccagggagaacctatgcccgccgacgactaaatgccatataattaaccgtatggacgttcaattgaacaccttcggtgaacaggagattcataaatgattttacgtgttttggctgtatcgatgattggttttacgctcgcaggctgcgtgagcagcagcggcctgtccggcgacgtttattccgcatctgaagccaaacaggtgcagagcgtgacttacggtactatcgtgcatacgcgcgccgtacagatccagagcggcgacgatagcaatgccatcggggccattggcggtgcggtactgggcgggttccttggaaacaccatcggcggcggtaccggacgctctctggctacggcggcaggtgcggtcgcgggcggcgtagccggtcagggcgttcagggcgcgatgaataaaacgcagggcgttgaactggaaatccgtaaggacgatggcaataccattatggtagtgcagaaacagggcagcactccgttctccgttggtcagcgcgtggccattgccggcagcggcagccaggtcaccgtctctccgcgataatttcccttacgatgcggccggttgcgccgcatcgtatttttcagccacgtttatttcgccgtaataaattcgtagtaaccatcagacatctttattttaatattccatgaatcattgcgcctgcgcaatatcttatctgcccgcccctattaccctcaagaacgtaaattagccctggtgactcatcgtcgctgccgttgccttttatgtggaatattgcctatgcccgaacatgtgcatcatatcgttaaacgtctaatcctttatatttgcatttgtttactggccgggattggcatttccgggatgactgctttttttcataccagcttcagtagtacttcctcaatattatttccgctgctgaccagtttcctgatggtttttcatattaccattgcctgttttatgggcatgaaatactggagcagcaagcggcgtctgtaccttactccggtctctttcgggtttgcctgctcagcgctgctgatgcttggcacgctcagcagctatccggactggcttacctgcaatccggccccggtcgttaatcaaaatgacgccgttatctattatttcttccgcaatataatgatggctgtgttattcatgtcatctattattttgtactattttcgccagcgcatcatgcattcgtggaaagcacacgttcttacatttacagcatgtatactttttacgttgaccattattgttttatcatggctatactccagccattcgccgtggctgagcgtcaattttatcgacgatctgagccatacctttaccccgttgtggcaaagtattatcggctggctgctgatggcagtttggttcatcacgctgattttattaattagcttgagtaaactgcgtaatattttttggttcagcggcgcttttttttgcagcgcttatttgttcacgcttttccagctgctctccaccgcaggggagctggatcagacctggtaccaggcgcgttttttcgaaacgctatgcaccttgttcctgattctggtgctactggttgacgtctttatcctctatcgcgagtctaaccacaaatatgtccattcgtatcagaattcgatccgcgacccgttgacccgcctctacaaccgcagctttttctacgacactcttaaccaacagctggcgaaggtgaatgcccagcatccgctgtcggtgctcatcagcgacctcgaccatttcaaacgcatcaacgatagctacggccatgtcgcgggcgacaaagtgatccagttcgccgcctcggtgctggaaagccattcgcgggtagatgacgccgccgcacgcatcggcggtgaggaatttgctctgctgctggtcaacaccggtgaaaaagaagcgcaagcgatcgccgagcgtatccgcctggcggtcagtgccggggagagccatttaccggagcgaatgaccatcagcatgggggtgtataccacctacgacaatagcgtgacagcggaagcgtgcgttcagcgcgcggacgaagccatgtatgaagcaaagaataacggacgtaaccaggtgatcgtctggcatcagcagggagggtgaaaaaaggcccggattagcccgggccgcaaagaattaatctttagcctggagatcgaggatattttgttcaagtttacggattaagtggagcaaggtttccacttcctgcttcgagacccctgagaggatttcatcacgggtcttacctatcacctcttccatctcgttgatcagcggttcggctttttccgtcagcttgatgcgtttggcccgccgatcgcttgcgcaggtctggcgagaaatgagccctttctcctccagctgatcgagcgtacgcaccagcgacggctgttcaataccgatagctttcgccagctggatctgcgactgctcaggcggcagctggtggatgttatgcagcgtgacccagtgggtctgcgttaactccagaggtttcaggcgatggtcgattagcgcgcgccaaacgcgaactaaacgtgccagatcagaaccaagtggcgattccaatttcatctccttataattagcttgctaagttattatactgattttagaatagtgtgcagcatttgaattatcaaaacaaatgaattacttgattcaacaaaaaccaaaacaatgatttacactgttaaagagtagcacgtcctgaggttacccctgtaatggcaaaggatttttgcttgtgaaactgagtcttaacacatccggattgccgctgcaggacctggtgttcggcgcatccgtctatttccctccgctgttcaaagccgtcttgttgggtttctttatctggttgtttttacatcgccagctgcgtgactggatgtatgcgggcgacatctggcacccgctactaatggatctctccctgttcgcgctctcggtctgtctggccctggtattactcattgcctggtgatctccctgttatgaaaagattaaaatatctgtcaacgctgctggtcgcggccgtcgccctgattgccgcatggttgttatggaatttctacactcagtcaccctggacccgcgacggcaaagtgcgcgccgagcaggttgggatcacccctcaggtctccggcagtattctgcagttgaacgtaaccgataaccaacgggtcaaagccggggaagtattgtttaccatcgacgacaccccctatcgcatcgcggtgctgaacgcccaggcgcagctggcgaaagcccaggcggaggtggcgaaagcgcaggcggagcaaagcaaggccgccagcgaggctcgccgtcgccgaagcctgtcgcaaaatgccatctcggctgaagaccttgagaacgtcaataccgccctgaataccgccaccaccaccctggctgccgccagagcgggggtcggcgtaaccgaagcggcgctgaaacatgcgcagtggcagctcagccagacggttgtcaaagcgccggtggatggctgggtgaccaacctttccacccgcgtcggtgattacgctaccaccggccatccggtctttgccctggtggacagccactcgttttacgtgctgggctacttcgaagagaccaaactgcgccacattcgcatcggcgatccggcacaaattattctctatagcaatcagcagacgctaaagggccatgtcgcgagcatcggccgcgcgattgtcgaccagagcgtggaacagggaaccgggctggtggccaacatcaaaccaaatatcccctgggttcgtctcgcccaacgcgttccggtgcgaattgcctttgatacgctgccggccgatgtcaccctggtctccggcaccacctgcactgtctcaattggcgggcagtaatgaacctgcagaccctgtcgtggcgcgcactcccctgggttaaagccacccggccgcagtggcggtacgcattgcgcaacggcatcgcgatgtgtcttgcgctgagtatcgcctatgcgctggatcttgatgagccctactgggcgatgacgtccgcggcggtggtcagctttcccaccgtcggcggcgtgatcagtaaaagttttggccgcatcgcaggcagcctgctcggcgcctgcgccgccctgctgcttgccggtcatacactcaacgatccctggctgtttctgttcagtatctccggctggctggcgctctgcacctgggcctgcgccctgttcaccaacaacgtcgcttatgcctttcagctggcgggctatacctgcgccatcatcgcctttccggtgattaacatcagcgacagctacgagctgtgggtcatcgcccagtcgcgcgtctgcgaagtcatcgtcgggatcctctgcggcgggctaatgatgatgatcctgccaagcacctccgacggcagcaacctgctgacggccctgaaaaccatgcacgcccggctgctggagcacgccagcctgctgtgggtgccggagacgacggatgccattcgcaccgcccatgagagcgtgattggccagatcctgaccatgaacctgctgcgtatccaggccttctggagccactaccgtttccgtcggcagaatcctctgctgaactacctcctgcatcagcagctcagaatgaccagcgtcatctccagtctgcgacggatgctgctgaactggcctgacgcgccggcgaatactcgccaggtactggagtcgctgctcgccgagctcgccacccctcatgccgacagctatcacgttgcgcggatcctggcgccgctggcgccgcggcaggatgccgattaccggcacatcgctttctgggcgcgattgcgctatttctgtcgcatttacctggagagcagccgctggatccgccgcgttgaaaatgcctcggcgatcgccgagttcaatgtgcccgccgccccgccgttagcccgccataccgatcaggcggaggcgttgctcaacggtgtccgtaccttttgcgcgctggtggcgattggcgcatgggggatcagtacccagtggaccagctgcgcggcggccctgaccctggcctccatctgctgcgtgctctactccgtatccgcctcgccgtttcgctcgctgacattgctgatgcagactctggtcctgctgtcgctattcagtttcgtggtgaagttcggcctgatggtgcaggtaaccgacctgtggcagtttctgctgttcctgttcccgctcctgaccaccatgcagttactcaaactgcagtggcccaaatacgccggcctgtggggacagcttatcgtctttatgggctcgtttatcgccgtcaccaacccgccggtgtacgattatgcggcctttttcaatgataatttgagcaagattgtcggggtaggctttgcctggctggcctttgcggtactgagtccgggctcggacgcccgcaaagggcgacgccatatcagagcgttacggcgtcactttgtcgatcagcttagccgtcatcctcagcacagtgagcatgaatttgaatcgctggtctatcaccacgtcagtcagctcagccagagtaaggatgccctggcgcgccgctggctgttgcgttggggcgtcgcgctgctcaattgctcgcacgtcgtctggcagcttcgcgaatgggaaacccgctccgatcctctcgcccaggtgcgcgacctgtgcatcaacctgttacgcgatgtgatgagcgagcgcggcgtgcagcagcgcccgctggcctccaccctgcaggagctgcagcggatctgcgacgccctgaaccaccatcatcagccggcggcgcgggaactggccgccgcgatttggcgactgtactgcgccttgtcgcagctggaacaggccccggtggccggcacaattggcgaaggaactacttaatcaccccgcaggcaaaccgttcgccgccgccgcccagcggctgcggactgtcggccatgttatccccgcctacgtggaccatcagcgctttccctttcacctccgccagcgttttcaggcgcggagcaataatcggctggtcggctacgcccgcatcgttgaccaccagcaggggcaggtcgccaagatgcccggcccccaacggcccttcgtgtttgccggtatgctgcggatcgtaatgtccgcccgccgccccggcggccacggctttaccttctttcatcgccggctggcagctgccttcggcatgaatatgaaacccgtgcttacccggcggtagcgcccgcagagtgggggcgaactcgagtccgcggtcggtttcggtgattttgacgctgccgatggtctgaccgacgccctgggtggtcacgagattaagttgcacatcttcactaacggcctgtgcgccagcgcaaaatgcgagggataagatcgcgagaatacatcgttgcataatacctccggatggctgtctccctgttaagtgtaaaccaggaacgcctttccggaggggaaatgcccgttacggtacgtcgtacccgagcgcggctttacggatgcggaaccactgctgacgggtcatgctgagtttttcagccacaatcgccgagcgcacgcgctcgattttgcccgagccaataatcggcagcggctgcgacggcagacgcagcacccaggcataaactacctgttcgatgctgtcggcgttaagctcgtgcgccacctgcgccagctcatcgcgcagcgcctggaagccctcttcgttaaacaggcgaccaccgccaagacaagaccacgccatcggacgaatacgcagttgctgcagctgatcgagagtaccgtcgagcagcagcggctgatgcaccggtgaaatttcgacctggttggtggcgagggtaaacggcagacgtgactgcagcaaggtgaactgggcgggggtaaagttcgagacgccaaaatggcgcactttaccgctatgatgcagcgcgagaaaagcttcggctacctcgtcggcgtccatcagtgggtccggccggtggatcagcagcaagtcgagatggtccgtcgccagattacgcagcgattgctcggcgctgagcacgatgtgatcgcggtcggtaatgtagtggccaatggtgttctcagcgcgcgcccgggtggcgataccgcatttgctgacgatttccatccggctacgcagatgcggcgctcgcttcagcgcttcgccaaaggcagcctcacactgataatcgccatagatatcggcgtgatcgacggtggttacgcctaaatcgagatgctgctcaataaagctgaccagctcgccaggcgacattttccagtccatcagacgccagtagcccatcacaaaacgtgaaaattccggcccctggggagccatagcaatacgctgaaccataaccgcttcctcaataaaaaagtgctctgagtatacgtaatttttggcttaaaacagtgagggttgctgcggttcttccgccggctccggcctgttcgcgcgtattttgcgcagcagccgttggcggcaaagacgcaaaacctcctgtttctgcgcatcgctcatcgtttgccagttaaaacgttcctcacggctgcggaaacagccgcgacagtagccgcgctcatcggtctgacatattccccggcacgggctctgcaccgggaaaaattctaactgctctgccaccacacgcctcctgtcccctcgtctcctttcattgaagacgtttccccgcgccgacgcaaattttgttcactacgtgctgcgtcagctaacatttttccgccgacgcttgcattagaccaatcggtctactacagtgtgcagcatgaacagacacagcgattgcgatacccgagaacatatcctggccaccggcgagcagctttgcatgcatcgcggttttaccggaatgggcttgagcgaacttctgaagacggcggaggtgcccaagggctccttctaccactactttcgctctaaggaagccttcggcgtcgcgctgcttgaacatcactacaccggatatctgcagcgcctggtcgaccacttcgatcatggcgacggtaactatcgcgatcgcctgctggcctactatcagcacacgctgaatcagttctgccagcaggggattattagcgggtgtcttactgtcaagctatccgcggaggtttgcgatctgtcggaagatatgcgcgccgccatggatcgcggagccagccagattatcgccctgctgggcgacgcgctggagaaaggacgtcaggaaggcagtctcgcatttgacggcgcggccatgaccctgtcgcaggtgctgtattccctgtggctcggggccaacctgcaggccaaaattacgcgtagcgcaacgccgctggaaagcgcccttgcccacgccaaacagattattgcggcgcctgcggtataacaggcgtttttatttcatcagttactagacgaccggtctactcaggagtcactatgtcggaagcaaaattattcagcccactgaaagtcggtgcggtcaccgtccctaatcgcgtatttatggcgccgttgacgcgtctgcgcagcattgagccgggcgatatccctactccgctgatgggcgaatactaccgccagcgcgccagttccgggctgatcatcaccgaagcgacgcagatctccgcgcaggccaaaggctacgccggcgcgcctgggctgcacagcccggagcagattgccgcctggcagaaaattaccgccggcgttcatgccgaaaacggtcatatcgccgtccagctgtggcacaccgggcgtatttcccatagcagcctgcagcctggcggcgccgccccggtagcgccttccgcgctgagcgcgggcacccgtacctcactgcgtgacgaaaacggccacgccattcgcgtcgacacctcaatgccccgcgccctggaaaccgcagagatcccagggatcgtcaacgatttccgtcaggcggtcggcaatgcccgtgacgccggcttcgatctggttgagctgcactcagcccacggctatctgctgcaccaattcctctcgccatcggcgaaccagcgtaccgatcagtacggcggcagcgtggagaaccgtgcccgtctggtgctggaagtggttgacgccgtgagtcaagagtggagcgccgagcgcattggcatccgcgtgtcgccgattggcagcttccagaatgtggataatggcccgaacgaagaagaagacgcgctgtatctgattagcgagctggcgaaacgcggtatcgcctatctgcacatgtccgagccggactgggcgggcggcaaaccttacagtgaagctttccgtcagaaagtccgcgaccgcttcccgggggtgatcattggcgctggcgcttacacagtagaaaaagccaacgatcttatcaataaagggctgattgatgccgtggcctttggccgcgattacatcgccaacccggatctggtggctcgcctgcagaaaaaagcgccgcttaacccgcaacgcccggaatccttctacggcggcggcgcggaaggctacaccgattacccgactctgtaatccctccattgatagcggcgacgtatcgccgctatactcaacgttctgatctatcaaataaactgcataggggacattatgcgcttactccacaccatgctgcgcgttggcgacctgcaacgttctatcgacttctataccaacgtgttgggcatgaagctgctgcgcaccagcgaaaacccggagtacaagtactccctcgcctttgtcggctacggcgaagagagcgaaaccgcggtgatcgaactgacctacaactggggcgtggacagctatgagctgggcaccgcctacggccatatcgcgctgagcgtcgataacgccgccgaagcctgcgaacggatccgtcagaacgggggcaacgtcacccgtgaagccgggccggtaaaaggcggcaccaccgtcatcgccttcgtggaagatccggacggttacaaaatcgagctcattgaagagaaagatgccggcaaaggtctgggcaactaacgcttccccacgctggcatatttaatgccatggctcgcccgggcgctacggcgcccgttgttttcacccctgcctgctgcaagccgcggcaaaatttgccataatgcgcgctacttttttccagctaagagaatctgatgtccgagaacgctcaactgaatggtctgtgcgaccgtttccgcggtttttatccggtggtgatcgatgttgaaaccgcaggatttaacgccaaaaccgacgccctgctggagatcgccgccattacgttgaagatggatgagcacggctggctgatgcccgatgaaacgctgcatttccatgttgaacctttcgagggcgccaatctgcagcccgaagcgctggcttttaacgggattaacccgcatgacccgcagcgcggggccgtcagcgaatacgatgccctgcatgccatcttcaaaatggtgcgcaaagggatgaaagagagcgactgcagccgggcaatcatggtggcgcacaatgccacctttgaccacagcttcaccatgaccgccgccgaacgcgcgggacttaaacgcaaccctttccatccgtttgttaccttcgacaccgccgcgctaagcgggctggcgctgggccagacggtgctgtcgaaagcctgtattgccgcgggtatgccgttcgacggcgcgcaggctcactccgccctgtatgataccgagcagacggcgcagctgttttgcgagatcgtgaaccgctggaagcgtctgggcggctggccgctgcccgtagccaccccggagtgataaaaaaagcgacttccaggaagtcgcttttttactgatggcgggaattactccgcttttggctcgtcggtatggtactttgccgccgtctctttgatcagctgctgcagttcaccgcgctggtacatttcgatgacgatatcgcagccgcccaccagttcaccgtctacccacagctgcgggaaagtcggccagttggcgtatttaggcagctcggcgcggatatccgggttctgcaggatatcaacgtaagcaaaacgttcgccgcaggcggacagcgcctgaacggcctgggcagagaaaccgcagcttggcagcttcggcgaccctttcatgtacaacaggatcgggttttcagcgatttggcgttggatcttttctaaagtcgagctcattgtcgtgcttccttaaacttctttctacggcagtaacttgtcattgtagcgtcctgtaggcaggacggataataacatttttttcactattcatattttatcttctgttgcgcgaagttgccttaaaaatatcattttgcggtcacaggcgggcgctcattgcgcattttctgtgcgaggcggtcaatgtctgacgcgttttcttgcaatcgttaaccaatcgacatttttgatacaaaagaatattaactttccggctttttatgctttagaatcattccggtttgtcattcatcgtcaggcatttgtacatgtctgtaattaatcaggggattgctcagtggcgcggctaaacaaaatcgcgatatcgctctgtgcattactgttcacgtctatctcattcacgccactggctcaggcatcagggcatacgcacgcctccgcttcgccaaaagcgttgcccgcgaaaagtggctcagagcgcaagaaaaaagcaaccagtcaaaaaactaaaaccaccgctaaaaccaccagtaaaaagtcctcgcgcacccggctccctacccgcactaccgcagcaagccaaaccgcacttcatcgtcaggccgccggcgcgacgaaaaaatgcgtgctgcgtaaaggttataaaaagcagtgcgcgaaaacggtcgccgccagcgccgagccgaccctggcgctaaacagcgtcaaaagcaaatgcgtggtgcgcaagggctataaaaaacgctgtaagcccgaggccagcgaagcgaatttaacgatcgccgacgcccacaaggtccgggtgcaaaaagcgcaaagtaccgcgatgaataaactgatgggccagttgggtaaaccctatcgctggggcggcacctcgccgcgcaccgggtttgactgcagcgggctggtctattacgcctataaggacctggtcaagatccacatcccgcgtacggccaacgaaatgtaccacctgcgcgatgcgcgtccggtggatcgtgatgaactgcagagcggcgatttagtcttcttccgcacccgcggacggggcgctgccgaccatgtcggcgtctacgtcggcaacggaaaattcattcagtcgccgcgcacaggtcgtgatattcaaatcacctccctgagcgaggattactgggttcgccattatgtcggcgctcgtcgcgtcatgacgccgaaaaccattcgctgatcccggtctgccgctgcggcggcagaccgcctctcctgctcgatctccatccccacccgcaagggatattgcagattgctctctttgcccggcgtatcacgacgatagcgggtcggcgacatgccaaagtgacggtgaaaggtccggcagaaagcggcttgtccctcgtatcccaggcactgagaaatactctgtatcgacgcctgcgtctgcgttaaatagattgtcgcaatcgtcatctttcgtcggctgacgtagctcgccagcgtgcagcccgttaccatggcgaattgtcgctggaagtaccagtgtgagtagccggactttttcgcaatcgcgctcaccgacagggtgtcgaaaatatgtgcttcgatccagtcaacaatcccctgcaccaccgggatcattttcgcgctcaccacctcatctgtttttgccatcgtcgtcatcctggggaaattactgctggcggctatatttgtcatacaaattaaaaaatagacaatgaattattggcatagcgacgattgcctgagcgcatatttttattaatcgtttgatattaaagttttattttttgtccagcgcattgcttgacagcggcgaagcagagtagttaatcgccatgcgagttcgcaaatccgcagagggcatctccttatacatggttgcaacaattttggcggcttatcacccactcctgcagaaaacggttaagccttcaccacatgcaccggtgataatagcctttatcgttgtaaggcttttcactgcttgcggcaaatgttaacattctcaatacaataacacgcccgggacgcgacagcgtcgggcggtcagaacacgattcaggtgaaaacctcatcctgtcaatgtgagataaaacaaaaagttataaggagagtagcaatgtcgtttgaattacctgcattaccatatgcaaaagacgccctggcgccgcacatttccgcagaaaccctggaatatcactacggtaaacaccaccaggcgtatgtcactaacctcaacaacctgatcaaaggcactacgttcgaaggcaagtccctcgaagagatcgtccgcacgtctgaaggcggcgtgttcaacaacgcagcgcaggtctggaaccacaccttctactggaactgcctggcgcctaacgccggcggcgaaccggaaggcgaactggcggccgcaatcgccaaatctttcggcagcttcgcggattttaaagccaaatttaccgatgccgcggcgaaaaatttcggcgctggctggacctggctggtcaaaaatgccgacggcagcctggctatcgtctccaccagcaacgccggtaccccgctgaccaccgacgcgaagccgctgctgaccgttgacgtttgggaacacgcctactacatcgactatcgcaacgcccgtccaagctacctggaccacttctgggcgctggttaactggaagtttgttgcggctaacctcgcggcataaacgacaaaccgcagcggggtctccccggctgcggttttttttgcccttgcccagccgatgattactggctggcgaaagcctcttccggctgcgctcgcccgctaaaccagaccagcagcagcgccagaccagcgataatcgcgcccatcaccggcacaaacgcatatcccagtccgccagagatcaccgccccaccggcggcggcgcccagcgcgttgccgaggttgaacgcgccgatattcaccgaagaagagagccccggcgcctcatgcgctacgcgcataacccgcatctgcagcggcggaaccaccgcaaaggttgctgcgccccagacaatcatgctgatggccgccccggcctgggattgcgccagcagcgggatcgccagcatgatcgccatcagcagcagcagaaagcccttcagcgtgccggagaccgaccggtcagcaaatttgccgcccagatagttgcctagcgaaaaaccgacgccaatcagcaccagcatcgcggttataaacagcgatgaagcgtgggtcagcgtattgagcactggcgaaatgtaggtatacagcgtaaacatcgccccggcgcccagcacggtggtcagcaacgcggagagcacctgcgggcgcagcaggacagaaagctcttttttgacatcaggacgttcccccgcgctgcccttcggcagggagaaccacaggctaaccatcgccagcaggcctaatcccgcagtagcaaggaaggacatccgccaaccgatggtttcgccaagccaggtggccgccggcacgccgccaatgttggcgatggtcaggcccataaacatagtggctaccgcgctggcctgcttatgctttggcacgacgctggccgccaccaccgatcccaggccgaaaaaagcgccgtggttgaggctggtaataatccgcgacagcagcagcgtggtgtaatccggcgcgatggatgacaacaggttgccgacggtgaagatccccatcagaaaaatcagcgcattgcgccgtgcgcgatgcgacaacagcagcgtcatcagcggtgcgccgaccatgacgccgatggcatacgcactgatcagcattcccgctaccggtatcgagacgtccacacctttcgcaatcaccggcagcaatcccatcggggagaactcggtggtaccgatgccaaaggcgccgatcgccagcgcaagtaaaggaaagttgattttcattcaatgactccatcagaccgtcagagaggacggcgtaacatcagaagtcaaaagcatgacatcaatcacaaaaaaacaaaagtgaacgaaatgacaaaagatttttgcagaattgataataatggcgggatatggggaggaagcggcctcctccctcagcgaaacattagtgcagtatggcggtcaggctgaaagcgacaatcacgccgagagcaataatcgtggtgatcagcgaaaactttaaattggtatccatcatttttccctcttgttatccccacaccaaaagtgagcttgctcatttttgcacaaaaaatcgcaaaaatcttccgggatttagggcgatgcacatttttgctcttccactttgccccaagatcggacaaaatcccacgctaatttaaaagcgtatcggccattgaccccttcctgtcgttctgtgtcgttttcccgacgtgatgcaatgttgaaaattgtattcagggtgtgtgtaggcaaacgtttacgtatcgatgatcaggcgatcaggtcaaggcatggagtgagatgtaatggcaactattaaagatgtagcgaaacgcgcaaacgtttccactacaactgtgtcacatgtaattaacaaaacccgtttcgttgccgaagagacgcgtaatgcggtatgggcggcgatcaaagagctgcactactcgccgagcgccgtggcgcgcagcctgaaagtcaatcacaccaaatcgattggcctgctggcgaccagtagcgaagccgcctatttcgctgaaattattgagtccgttgaaaagagctgcttccagaagggctatactctgatcctcggtaacgcgtggaacgatctggaaaaacagcgcgcctatctgtcgatgatggcgcaaaagcgcgtagacggtctgctggtgatgtgttccgagtatccggattcggtattgagcatgctggaagagtaccgccatatcccgatggtggtgatggactggggcgaggcgaaagccgacttcaccgatgcggtgatcgataacgccttccagggcggctatatcgccggacgctacctgattgaacgcggccatcgcgaaatcggcgtgatcccgggtccgctggaacgcaacaccggcgcggggcgactggccggcttcatgcaggcgatgaaagaggcgcatatcagcgtgccggaaaactggattgtgcagggcgacttcgagccggagtccggctaccgcgcaatgcagcagatcctaaaccagcagcaccgcccgacggcggtcttctgcggcggcgatatcatggcgatgggcgctatctgcgcggcggatgaaatgggactgcgggtgccgcaggacatttcgctgatcggttatgataatgtgcgcaacgcccgctatttcagcccggcgttaaccaccattcatcagccgaaagattccctgggcgaggccgcatttaacatgctgttggatcgtatcgtcaacaagcgtgaagagtcgcagtctatcgaagtgcacccccgtctggttgagcgccgctcggtagcggatggcccgtttgtcgattatcgtcgttaaggcatctggcgggcgcggatctctccggcgcccgcagccactcccgattcagcgtgtcgctgtcccccagatagtcaagcatccagttcagcgccggtgaggcatcgttctgctgccacgtcaggcagcaggcggcatccgggaacggattttccagcgccagcgcagtccactcgccgcgatctatccatggacgggcgaaatggctcggcaccatgccgacgcagagtcctgccgacaaacaggttgctgatgattcccagtcagggacgactaccctcttctggttatccagcaaccatgttgtccgtttaggcaacgagcgcgaggtatcctcccgcaccagcgacggccagttacgcaggacgtcgtcgctcaggggtccctccatctttgccagcggatgatcgctcgccaccacgcagtcccagctcagcatccccatatcgcggaacgcatagcgaccgccgaccggaatagatcgcgttgcgccaatcgccagctcaacgcggccgtcggccagcgcatcccatacaccattgaatacttcctgaaagacgatcagttcgacgtcgggaaaatggcgatagaagtcgacgatcatctgacgcatccgcgccggtttcacaatatcatccaccgcgatcgacaactgtccgcgccagccgttcgcaatttgctgacactgctggcgggtgatctgcatttttttgataacagagcgcccttcctgtaaaaaccagaccccggcgggggtcaactccacatcacgatggcgacgctcaaataagggaacggcgagccactcttcgagctgacgcacggtatagctgaccgcggaaggcacccggtgaagctcctgcgcggccgcgctgaagctgccgttacgggcgacggcatcaaccacttccagagagtattcagaccacattttctgcctgcaaaatttttgaatgcatgtgacaaatattagcgtttcacaagccacaatgcactccctacactctgcggcatcgtacctgtacaccaactatgagaacgttatgtcacaacccgggaaaggatttttagtctggctggccggcctgagcgtgctgggctttctggccaccgatatgtacctgccggcgtttgccgccatgcagcaggatctcaacacctccgccgcctccattagcgccagcctgagcctgttcctcgccggcttcgcgctgggccagctgttctggggaccgctgtcggaccgctatggacgtaaaccggtgctgctgagcggcctggcgattttcgcggccggctgtctggggatgctgtgggtgcacaacgccaccctgatgctggcgctgcgctttctgcaggcgattggcgtctgtgccgcggccgttacctggcaggcgatggtcgccgattactatcctgcccagcgcacgaaccgcatcttcgccaccattatgccgctggtaggactgtcgccggcgctggccccgctgctgggcagctggctgctggtgcacttcgagtggcaagccatcttcgccaccctgttcgccatcactctgctgctgatgctgcctgccctgcgcctgaaggcagccgcgaagtcagtagtagtgacgcagcaaaagatcacctttctcgcgctgctgcgctcccgggaatacagcggcaacgtcctgatctacgccgcctgttccgccagcttcttcgcctggcttaccggttcaccttttatcctgcatgaaatgggctatggcccaaccgctatcggcctgagctatattccgcagaccatcgcctttctggtgggaggctatggctgtcgcgcgctgctgcagaaatggtccggtcaacagatgctgccgtggctgctggtgatttttgccgtcagcgtagccgccacctggctggtgggcctgcaaacccatgcctcgctggtggcgttaatgatcccgttctgcatgatggcggtggtcaacggcgggatctaccccatcgtggttgctcaggcgctgaagccttttccgcaggcgaccggccgcgcggcggcgctgcaaaataccctgcagcttggcctgtgcttcctgaccagtctgctggtatccgcgctgatcgccacgccgctgctgaccaccaccagcgtaatgctggtttcgattggcttagccggaataggctatcgcctgcagcagacgccggagctgacaccccactcttcccacgcgtaatgcccgtcgccagggcccggaccagtcgttagcatgctaagaaatttttattgaaagccagtacttagcgtcctatactggatccgggttcacataaatagaaaatagttacagattaacggatgcaggatgcctccgtttcaccatggaaggcctttcggcaagggttatctcccttcctctgtttacgtcggatagcgacttcacggattatccgtgagatttctcacaaagccaaaaaagcgtctacgctgttttaaggttctgatcacttgggcgtgatggagaagctatgagttcatcgtgtatagaagaagtaagtgtaccaaatgatgactggtaccggattgcagctgaattattaggccgtgcgggaattgaaatcaatggctccgcgccgtccgacctgcgggttaaaaatcctctcttttttaaacgggttttgcaggaaggttcgctgggtttaggcgaaagctatatggacggctggtgggaatgcgagcgtctggatatattcttccacaaggtgttacgcgccgggttggaaaagcagctcccacaccatttcaaagacacactccgcatcgcaggcgctcgtctgtttaatctacaaagtaaaaaacgtgcctggattgtcggtaaagagcactacgacctcggcaacgatctattcagccggatgcttgatccctatatgcaatattcctgcggttactggaaagaggcgcagagcctcgaggccgcccagcaggctaagctggatctcatctgccgcaaactggagctggagccaggcatgcgggtactggatattggctgtggatggggcggtctcgccgaatatatggcgcgaaattatcaggtcagcgtcgtgggtgtaaccatctccgccgagcaacaaaaaatggcccaggcgcgctgcgccgatctcgatgtagagattcgtctccaggattatcgcgatctgcacgacagctttgaccgcatcgtctccgttggcatgtttgagcacgtggggccgaaaaattacgccacctactttgaggttgccgaccgtaatttgaaacccaacggccgctttttactgcacaccattggttccaaggtcaccgaccataacgttgacccgtggatcgataaatatatcttcccgaacggctgcctgccttccgtgcgtcacattgccgaagccagcgagaagcattttgtgatggaagactggcacaacttcggcgctgattacgacacgaccctgatggcctggtatgagcgtttcctcgccagctggccggaaattgccgataactattctgagcgtttcaaacgcatgtttacctattatctgaacgcctgcgccggcgccttccgcgcccgcgacattcagctctggcaggtggtgttctcgcgcggtattgaacatggactgcgcgtcgcccgttaaataacactcccccgcttatcggcgggggattttttttcaggcttcattgaccttagccgccatctctttcgcggccagcacgcgttcgaccgtatcgacaaccgcctgggtctgcggatcaatctcaatattgacgcgatcgcccagtttttttgctcccagggtggtccgctgcagcgtctccggaataagatgcacgcagaaacgggtcgccgtcacctcacccaccgtcagactaatgccgtcaataccgatgaatcctttatagaggatgtatttcatcagcgttggatcctgcactttaaaccagatctgacggttattttcggaagtcagaatcttcacgatttccgcggtggtcataatgtggccggacattaaatgcccgccgatttcatcactaaatttcgccgctcgctcgacgttcacttcatcgccgacctgaatatcgccaagattggtaatccgcagcgtctctttcatcagatcgaagctgatgcgcgcgccgttgatttcggtcaccgtcaggcagcagccgttgttggctaccgaggcgccggtttccagcccctccagcatatgtgccggtaactcaaccacgtgagtgcgaaaattgggtttatcatcaatggagaccactttcgcggttccctgaacaataccagtaaacatgtttggctcctgttgaaaatcatgacggtatcattaccgctttcgctatcgggaacaataacaggagggcaaagcggttgccagcgcgcttcgtgcctcgactcttttttcactggcttaatagccaatcctcgctacaatagactggaaattcctcatttttatccccttgctgccagttacggcggcttttttagtctcaaaataacaacaattcgaaggtgttcacgtgcagaagtatttcgttgaagcgcgtcagttattagctctggctatacccgtcatccttgcgcaggtggcgcagacggcgatgggttttgtcgataccgtaatggcgggtggctacagcgccacggatatggccgccgtggccatcgggacctccatctggctgccggcgatcctcttcggccacggccttctgctggcgctgaccccggtggtggcgcagcttaacggatccgggcggcgagagcgtatcgcgccgcaggtgcgtcagggcttctggctggccggctttgtctcggtgctgatcatggtcgtgctgtggaacgccggatacatcatcagctccatgcataacatcgatccgctgttggcagagaaggcggttggctacctgcgcgcgctgctgtggggcgctccgggctatctgttcttccaggtcgcccgtaaccagtgtgaagggctggcaaaaaccaagcccgggatggtcatgggctttattggattactggtcaacattccggtgaactatatttttatctatggtcatttcggcatgcccgagctgggcggcgtcggctgcggtgtggcgacggcctccgtttactgggtgatgttcgccagcatgctgtggtgggtgcgccgggcgcgtacgatgcgcgatatccgctgcgccgagcgcttcagcggccctgattttgccgtcctgttacggctggtgcagctggggctgcccattgctctggcgctgttctttgaagtcactctgtttgccgtcgtcgcgctgctggtctccccgctcgggatcattgacgtcgctggtcaccagatcgcgcttaatttcagctcgctgatgttcgttctgccgctgtcgctggcggcggcggtcaccattcgcgtcggcttccgccttggccagggctcaacgatcgatgcccaggtttcggcccgcaccggcgtgggcgtgggggtctgcctggcggtatttaccgctatctttaccgtcctgatgcgtaagcagattgcgttgctgtataacgataatcccgaggtggtgacgctggcctcgcacctgatgctgctggcggctatctatcagatctccgactctattcaggtgatcggcagcggcattctgcgcggctataaagatacgcggtctatcttttttattacctttaccgcgtactgggtgctgggtttgccaagcggctatctgctggcgctgaccgatatgattgtgccccgcatgggacctgccggtttctggtgcggatttatcatcggtctgacctccgccgccatcatgatgatgctgcggatgcgttttctgcagcgccagccttccagcatcatcttacagcgcgctgcgcgctaacttgtctaagcccgccgctccggcgggctttttcgttcttcgctataacggcgcgttgtacattccgttactccctgacaccaaagactcactgatagcctcccggcaggcgcttatagtgttgccaacagccccgcagtggggttactcaagaaaccaagtcgaggatttcagaatgaaaaaagtattagctctggtcgttgccgctgctatgggtctgtcatcagttgctttcgctgccgatgcggcaagcaccaccccgagtgcagcagccagccatactaccgttcaccataagaaacatcacaaagcggccgcgaaaccggcagccgagcagaaagcgcaggcggcgaagaaacaccacaaagctgctgcaaaaccggctgctgagcaaaaagcccaggcggcgaagaaacaccataaaacgacgcaccacgcagctaaaccggcggttaaaccggcggcataatggtcagggcgttaaggtgataaaccggcgctgaacagcgccggttttttttcaggaggacatcatgctgcaacgctatcgcttcgaattgctgctgttactgctcatcgtctgcgcgctgtttaccctgcgcttgatgtttaaatagctggctgctgaacccatttacgggccggcggcgtatagtcgcgaaaaccggcgataatctcgtctgccgaggtagcgaacggcagcatctccgcgtagcgcgggtgcataaacccttcccgtaccatgttatcgaccatcgcctgaagcggatcgtaataccccttaatattcaggaacgcgcacggtttctcatggatccccagctgcgcccaggtccattgttcgaaaatctcctcgagcgtccccgccccgcccggcagggcaataaagccatccgccagcgccgccattttggttttccgctcgtgcatatcctcgaccacatgcagctccgtcaagccgcggtgggcaatttcccgctccaccaggccgcgcggcatcacgccgatcaccacgccaccggcctccagcgccgcatcggcgaccgcccccatcagaccaactttgccgccgccatagacaagcgccaacccctgctgcgccagcgtacgtccaaccagacgggcggtttcgaggtacagcggatgttcgccagctgaagaaccgcagaaaataccaatcgatttcatcttcgttatgactccttctcttctggtggccgataatttaacacatcggcaacccttccgcgcaggtttggactggctgaaaaataagacccgtgatgctcgctggcgaagaaatatccttgtggttcagtaaaatatatccggaatgagtaaaagttccgcaatcgcatgcaatgtgcaagaaaagtgacgtttacctcttgccacatcccctccctgccgctaatatgcgtccccgttgtcaccacaacattgcgttcgtagctcagttggttagagcaccaccttgacatggtgggggtcgttggttcgagtccaatcgaacgcaccataatgcgtttatagctcagttggttagagcaccaccttgacatggtgggggtcgttggttcgagtccaattaaacgcaccataatgcgtctgtagctcagttggttagagcaccaccttgacatggtgggggtcgatggttcgagtccattcagacgcaccaatcatttttccttctgtaattcctgaattttatcacctgctccccgttggtattgctgacattaaaatgttgtgtattggcaaagcgttttccttgcatagtccatactagtccacatgagtgctaaggaagccaacccttttaatgagcatcaaaaatcgatcaacagaccacgccgtttaatttcttaatgataatcattccattcatcataaatatatgcatatgcaaatcgatatatcagataccccaccaggaatcccataactgaaagtaaaccccagagaaatttatattcatttactgagaaaaaaagaaccagccagccagcgcgatacctgaagcacctaatcccatcccagcccctctgataacacgggaaagcaggatgagtaatgttcgttttatattcataatccaccaaagaaatattcacatattttgttaaattctgctggattcttatcaccgaccatacgcgctgtttcgaaaggttttacaatatcctcaacaagaaaatacagaagatccagatctcgcagattttgcagtttatcatgcagtaccggatttctgcgcttcagatatcgggacgtgtatattgctctggatgtttcagcaccaacggataataataatccggcaagacttcctgcaaaaatgcggacactcctcttgaggcgttcccctcttcctcatcccgctccgcgtcaggtgctgcggcttcggtcctgccgccatatgggttaacagttgctgattcagcaggctgtcgatattgcgccccccggtgaacaaccatccggtagcgtgactgccccagcggttgctttaccaaactggttgcatcgtttatcagcctgttcctcatcgcttcactccatcttttctggcgttaaaattcatcattacgacctccattcgttacccttcgccacccactggccgcgctatcgcacccgcctgctttcgcgaacgctaccgcccgtcgctgtctccctacaggaacccaaagcgcattgggtaaggcagaacggtgatcttttatttaacgcccggaataacagtcgctcagcaataaatgtccaaggaaatcccgttcgtatccgcgtactgccggagtacgtccagttttaattcagtggcatctcggttcagatcgggagtaactgcgtaatactgacaaagacgataagcagaataaaacaaataaactgacaatattttgtaagacgagagatggaggccgtctggacgcagggcggaagcggtggcttcgtaacaacaatattccatactgaaaactattccctggtgtaaaaaagcgagcgcgcggtacaaccgggaggaaaccatgccacagtaaaataaagaaagtccagccccgaccgggccagactgactttttaagattaacgcccgaattacattgagaatttacatataaatgacctgagccattgatcatctaataatatagcggacggatcgcacacatccagaataagctacgaaaacgcaccatgaaatacattgctgtcctgatttatatcagtaaatcccccccgaccgtatatcgtataacagctcatattatccaggcgatcctgacagggataatattccccgaccataaagcgcagcggcagcttgcgcacccaccgtctgacagacaagtcccgcatattgccttcagacaaggcgatgactggcctgcgccatcgccagggcgtcttcccctgccggcagccgcgaaggggcatcagcatcatgcaccattcgccagacggcctgagcgacatccgtcgcctgcgtcacgctggcgttatcctgcatgctgtcgaagatctgctggccgagcgccgcatagctctccgggagctgccccatcgtccggcgggcgttttccccgaaccgggtctgcggggcgcgtcccgggaggatcagccctacgcggatattaaaagcaaggagctccagcgccagcgactctgtgaaggcattcaccgccgccttactcgcggtgtagacagccagcaggggcatcggttgcagggtgaccgccgaggtaatattaacgatggtcccgcttcggcgcgctctgaaccgggggatcaccgcctgggtcatggcaatcgttcccagggtattggtggcaaacaggttggctatcgcctcgcgcggggcgccctccagggcattaagcatccccaccccggcgttgttaaccagcacatcaatctctccgacttcggcaatggcctctgcgatactctgcgccgaagtgacgtcaagacgtaccagccgcaggcggtcgctggcgggtaacacaccttcctgcggagcgcgcatcgtggcaataaccttccagccttgctcgagaaaataacgcgccgtctccaggccaaaacccgatgaacagccggtgatcattatcgtttgcatatctctgtctccgaatggcttcttccttttcatcatagacaggccgtgccggacgatatagggtcaataatccatcattctttagcaggagtccggaaatgagcgatccgctggcggaggtcatcgcgatgttaaatctcagagcggtgctgaccaaaaccatcgagggggcgggagactggcgagtccggcgctcggatcaggggttgtcattttatggcgtcgtgctggaaggcggctgtcggctggaaattgaccagcatgagccgcagatcctgcgcgccggggattttattctgatcccggcggcgtaccgcttctcgctaaccagcctgaccccgcccccttcaccggcgctggaaaccatcccggtgcaactggcggagggacactttcggctgggcgccctcgacaagcctgcgcagatgcaggcgctgattggccactgcgcttccggttcaacgaacgccagcctgctggcctcgctgttgccagcctttgtggtggtccgcaatcaaccgcggctggccacctttgtcgggctgctgaaagaggaagcgcaggcggatcgcgcgggcaaatctttcgttctggcgcggatggttgagctgctttttatcgaggccatccgttcctccggcacgctcgcgacccccggtctgatgcgcgggctgagcgacccgcgggtcgcccaggcaatccgtctgctgcatcaggcccccgccagacgctggacggtcaacgccctggccgccgactgcgcgctgtctcgctcgacgttatttgaacgctttaccgacctgaccgggatgaccccgatgggctatctgttaggctggcgaatgaccctggccatgcagtggctgagcgagacgggcatcagcattgcggatatcgccgagcgcatcggctatggctcggccagcgcgttcagcgtagcttttacccgttataccgggatatcgccgggcaaatatgcccgccagcgggcggcactaaatgtctcctggccagctctgacttaacctgccgcaatctccgtctgcagccagcgctcaaacatctgcagcgctggctccccctccccgccgccgggtttgatcaagcagaagcgcttagccagcgtcggggagcccggccacggggcaaccagcgttccggcgctcagctcgctttccacatacatcttcggcaccagggccacaccctgctggctaagtaccgcggcgatcgccatctcatgcagatcgtagcgcggcccctgggcggggttatccagcgccagaccgcactcgcgggcatagtgcagccaggcgtccgggttttgccgccggtgaatgcgcgttagccggttaagcagccccggaagatcgtcatccgtcagcagcgcagcatggcagaccggcagcaaatactccgcaaataaaaacgtcacctccattccggtccacgccgggtgttcaaaatggatggcggcatcaaatccgcttcccggcagaatgaagggatcgctgcgggcggcgatattgaccacgatatgcggatgctgcgccgcaaagcgcccgagccggggaattaaccagcggctggcgaaggtggggagcacggcgatctccaggctgcggccatcgacgggcatcccgctgacgtcatgggtgtcccgttccaggcgagcgaggatctcgcggacctgacgagcatagcgggcgcctgccggattgagccgcacccggctccccgtcctgtcgaagagtttactgtcgaggagcgcttccagacgggcaatctgccggctgatggccccttccgttaacgcgagctccgccgccgcgcgggcaaagttgccgtgacgagccgcggcctcaaaagccagtagcgcagcgctgctggggattttacgacgcatagccaatgctccttgtgcaggctcaccgaaagtcagtgacagaatatcactaatacttgaattaacatcgtttttcagcgccatttttagccgataggatgatgaaaactcactaaagcgccttgtgcgcacatcatctgttcatcgaggtcactatgctctatgtcgtcgaatgcgcctacaccgatccccaaagcgaagcggcgtggaataccttttacaatcaggaaaaactaccggcgctggtctctgtgcccggtttctacgcctcccagcgcttccgcgctctcagcgagggctgcccctgctacctggcgctgcacgatatccacgatgctaccgtcatcgacagcgacgcctaccgccgcaacggcggcggccattttgcccgctggcaatcggcgatcgccgactggcatcgccacctctatctaacgaataatacgctgcgggaggttgccccggatgaagtgctgctgctgggcgataccgcggaggacttgcccgtcgctgcgccgatacacctgcagccaggcggcctggcgaccgaacaaacccggtatgccgccatcctcccacgagacaacctgcatcacctggccacgactgccgccgtctttatctatcagcccatcaccgcccggttacgcaacccggcgcagcgcgcgtgaggtcgccatgtcacctgctcccttttatacgttgaccgctggcgacctgacggtgactgccgtgagtgatggtctgatgtcagcgccgctgtccttactctcgggtatctcgcgggaggaggcggagcatctgcagcggcattcaggattagcctcgccggagaccattgcgattggcgcctatctgatccgcggtcgcgggaatacggtgctggtggataccggcaccggcggagccaatggcgttggcggcgaacttatcgccaatctggcgcggctcggcgttggtcctgaggagatcgacgccatccttctcacccacgcccatccggaccatatcggcggcctgctgtccgccgctggtacgccagcgtatcccaacgccacggtgttcctgcctacgcgggaaagcgcttactggctggcaacatccacgttcgacaacgccagcgatcgcggtcggcgcaacgtgctgcttgttcgccgtgtactggcgaactgcgcggcgcaaatcagcggggttgatgatgaggaggtgatcgccgggatccgcccgtgccctctgcccggccatacgcccgggcataccgggtatcgtctcgaagcgggcgatacctcgctgctgatctggggggatatcgtccatttcccgtccattcagtctgcgcggccagaagcctcggtcgccttcgacgtcgatcctgaacaggcccggcgtaccagggagatcctgctgcgccaggccgccagcgaacggtggttgattgccggtatgcatcttggcctgccgggattcgccagagtggagaacaccgcctcaggctattgtctgcgctcggtgtaatcgttgagcagaacaatgaccacagtaaaaccccggtcgcggcatgagcacgaccggggcgttttgtccgggaaagtggacgagccgttaaccgcggctcttccagccttttttacttttgcagctagctttggtggcgacccacgggtgacgtagctgagtcaactgaagatcctgagaggccgggctggccgaccagcgtttgttgcacagaggcttacgagttgcaatgaccataaaaacgctcctgaaaagtaatgaaccattccctgggtagttccacaagttcagaattagcgtatcaccgcgtaacggaagttatttcaatctttgttttagaatgtaaatggtcatcgccctctgaaatagcttaaattgatccaaatcaatttaagtgcatttatttttcgatgccacctatattttcaagcgcttaccttcgccagccgcctgattaagacttttcctataccgcataatacaacagaatcaagcgatattatcagatttttattctagttatgtatggctatgtggttatttgttttgattattctaactgataaaattcacttggtcagtcagcagcgggcaggtactctgcaccggcaagaagaggatttgtcagggagtggtggatgactaaaggctataaactacttggctataagttagcggataatattttctactgcctgcatcatcgggaaattatcacgctgcgcgggacacggacgcaagtccagctacgcagcaccatggcctgtttactggagtacctgctggcgcacggcagagaacgtctggtcagcgatgaagagttaatgattaacgtttgggaaaaaaataatctccgcccttccgcgcagcgcctatggcaggttattcagagcttaaagtctcgcttacaccaggctggcgtggagagcgcgttaatcatccgagttaagtgcgcggggtattatattaataacgtttacgtagccgaaatttattcatacaaaccgccggggatgatgaattatataaacacttcgcctgctgatatgaataagcttctggtacgcagctaatcccctccccgcgccgtttacatcgccagcaacagggtttattcgttgaatattttaattcacagcaataatatttattttaatatcggtatcgcccagtgttttcgggatattcagaaaacagcgcccgaattaaaggttattcactccctgcccctcagccatcttccagaactgtccgggctggatgtgattattttgtcactggaaaactatcatgattacctggctgccgctgaaatcgctcagcactttcagggcctggtcatcggctttacgtcagccggcaacgtaaggcgcggacgctcctttttcgcggataccctactgtgggtcagccagcgcgaagcggtacgtgaagtgagccgccttctgcgctgcctggccgagcgccgctggccactcgtgccgcgtcaccaacgtcagagcgtttctttccgtcaacgagccccgctcaaccgcctggagatgcggatgattgatgccaccatgaagggtcagtcggttcatcaaatggctgctacgcttgggattaatcgcaagcgggtctataacggcctggaaaggattaaagtgaatttccgcctggtcagtcatagccattttcatcatttcatgaccgacaggctctcttttagtcgcctgtctgccgacctccgatgcctgaccacagcagctaatgcaaccctgccgccgcgcgcagcctcacgaccggcggaaaatcattcatattatttgaaagagtttcgaaaattgttttgattttaagccccagcaatcaagcgtattctttatcacatcagggcaacaggccctttatcagacaccaaattaaggaatacaccatgaatttcatcaaaactttcgttgctgtttctgcgctgtctctgttctctgctgccagctttgctcagagcgtcagcgccactgcctccacgctggaccgcgcggaagctaaaattgccgcccaggccgcagaacagggtgcatcctataaaattaccagcgcccagtttaacaaccgtgttcatatgacggctgaactgagcaaataaacccttgcccctaaacgtttcctaaagcaccgcctggacggcgctttagtttttccccctgcctgacatttcccggcaggtccatgcggcattcgccggatcccggacaatactgactctcagcacaaaaagagcctgatagcaataaatacccgattggctggattatctgcggcttgtcggcgtaaagcggagaggtctgtcgccgcgaatcagtcggaggccttccgctgtctgcaaagcggcgcccattttggcaaaatttgcgtggcgtggtgagggtttgcagggcctccgtgccctggaaagactttattcgaaaaagacgtccggattttccgacagcgaaacaaaggatttcgtgtttttatccagcgcctgaatatcgccggtttcgatgtcgtagaaccagccatgcaggcgcagggtatggtcgcgcagaccaaccgccaccgaaggatgggtcttgatgttattcagttgggcgataacgttttcctgcaccatgccgttgaccttatcggtttcgctagcccaggttttcttttccaccaccgctttcgcggcatcggcatagcgtagccagtgagacaccgcaggcatcggctcaaggcactgacaggtggcgatcgctttcatcgcgccgcagttggaatggccgcagatcacgatatccgtcacgcccagcgcaaccacggcatattcgatggtcgcggaaacgccgcccggctccggcccgaaagacggcacgatattcccggcattacgaatgacaaagagctgtcccggctcctgctgggtaaccagttccggcaccagacggctgtcagaacaggagatgaaaagcgctttgggattctggctggaggccaggctgcggaagagttctttacgctgggggaagatctctttctggaagttgaggaagccctcaatgatatgttgcatagcagtgtctcttctctgtagttattacggtatgacaaagatcacagttattcagtttaccatcgatgacaagaatgggaatcgttattcaaacagttgcgcagaaaacgcgcgccgccaacgcctgcttctccccgtctaatacacacctttttgacgtgctttcctgaaccagtttgctactctgtctgctccaaccgtccacacgttaccgaccgcctgcctgcggcggacataacaggagtcgctatgttcctatccagcctgatggccattgccgcggtgctgatcatgggcgtgatcagtcccggcccaagctttatctttgttgcgcgcaatgccgtcgctcgctcgcgtctgcacggtatggtgaccgccctcggtaccggcgccggtgcggccattttctccattatggcgatgctgggcctgcagaaggtgctcaccgcggtgccggagctgtttattggtttgaaggtggcgggcgggctctatctgctgtggctgggctataaaatttttcgcgggtcggcgcagccgatggacttttccgccagcgggatggccggcaaccgctctttgctgaagaccttccgcgacgggctgtatactcagctcagcaatcccaaaactgcgctggtgttcgcctcaatttttaccgccctgctgccggcgcagatccccaccgccttctattacatcgtgccgctgatgagctttctgatcgacgtcagctggtattcgctggtggcgctggtgctgtctgccgaccgcccgcgccgcgtctacctgcggctgaagcggcggatcgacatcgccaccgcgacggtgctgggggcgctgggcctgcggcttatcgccacctccctcacccgctagcgggttacacggtatagatgcaaatatcgtgctgctgaaaggcaacgcgatattcgcgactgatattctcttccaccaccagcacatcgatatcgctgctggcggccaccacaaaccgcgctgcggccggaattttatccgaagtcagaccaacaataatttcgctgcactgtttaatgaccgctttcttgaactcgcagtcggcatagtcaaagccggtcaggcccgactctggcgccatcgcgcagccgccgataaacccctggtcgaataacatgccctgcacctgagccaccgccgcggcgccgacgcaaccgccgctcgcgcgctgcacctggccgccaaggatcaccacgtcatacagcggttttttcaccagtaccgcggcgatctccggggagttcgttaccaccgtcagcgccagttcggcgggcagcgcctcggccatcgccagattggtggtcccggtatcaatgaaaatagtgccgccgggcttcaccagccgggcacactgttgcgcgatcctgagctttatcgcgcggtttttatctttccgctgactgtaatcccccgcttccggcagactcagcaccgccccgccatacacctttttacagaatccctcgcggctgagctcatgcagatcgcggcggatggtatgctccgacacctgaagccgcgccgccagctccgcgcacaccactctgccattttcctgcaggatctggcaaatcaacgcttgtcgctgttggggaaaagcagcataatcgagcacgaaaactccttaaattatcaaaaacgagcaacagcaagcatgatcgtctgcgctgctttgattgtcaatgttcctgcccggaggtttaccatgaaaattgcccatttcgccctgtggacccaacagctcgacgtccaggcccgcttctgggtggacttctttgccgccagcatcaatgaaaaataccttagccagaccaaccccggctttgcctcctatttcgttactatcgacgatgaggtggtgatagagctgatgaccaagcctggcctgcagcaggccagcgcggataataaccataccggctgggcgcatctggccctctcggtgggcggggcggaacaggtcgatgccatcgcccaacgcgccggggccgccggaatactgatttcgccgccgcgcaccaccggcgacggctattatgaggcggtgatcgccgatcccgatggcaacctgatcgaaatcgtcgcatagtcagcagaacgccagtattcaggaggcatccatggcacattaccggattatcgacaccgcatcctggccccgccgggaccatttcactttttaccgccaattcgccaaccccagctttaatctctgcgtgccgatagcggcgcagcgcctgtacgaatgtgcgaaggaccgtcgggtctcgttttttcagctcgcgctctatgccctgctgcgcgcggccaacggggtaccgcagctacgccagcgcgtgcggaacgatgaggtgattgaatatgacagtctggcagtaatgacgccggtgatgaccgtcggagagggattccgtcaggtgtggtgcgacaatgcccccgagttcaccgccttcagcgccgcggccacgccgaagattgtcgcggcaagagagacatacccggcgccgctcatcgtcgatggcgagcattttatctgcgccagctgtctgccatggctccacttcacctcgatgacccatgcggaatatgccgtcggcgcggcggtccccgcgctcacttggggaaaattgcagaatggcgttatcccggtggccgggcggtttaaccatgccttcgtcgatggtctccacgccagccgcttttatgcccttgtcgaagagggatttaatgaccccgagcggctctggttgccgctaaccgaaaccgcaccctccctgcttcccccagcggcgaaggagcgttaacgtctgcccggaactgaccgccagggagccttcctccctgcacggcggtcggtacggggccactatcatcgttccctttcagccggcgaataccgcgcaggtgtgacgcctgttcagaacctcgcgattgaaaagctgggtcgcagacagcatgctgaccaaccatcatcagacagcggaaaacactgcttcatagccatagaatgggattatattgccgatcctttgctaaggataattagttataaatcatagcgtttcagtgttagacagggcgaagtgcgcctcttatctttcgtcatgaattgtaaataaccacgcaatcatttgatgaggtagcacttttgtccagattacaacaaggattaaaaaccagacaaacccgcttcgccctggcgctaaaagtggccctgctcggcggcgtggtagcattttcttctgttgcccatgcggaagtgatcctgaaagaaggtatcaccccggccactgacgccagccagatcccggccagcgccaaactgcggaaagacacggtggtggccgggatctccgagccgcaggggatctttaacccctactttttcgtcaacggctgggatgagaacgtgactaacgtcattttttcacgcctgatcgactgggacagccagggcaagctggtcccgggactggcggagagctggacggtcagcccggacagtaaagtctataccatcaaattgcgccctggtctcacctttagcgacggctcaccgctgacggcggaagatgtcgcctttaccctgacggtcctgctcgaccccagctatgatggcgataccgacatcaccctggccaatatcgctggcggggcggactacaaagccggcaaggctgacagcgtcagcggcctgaaggtcatcgacccgctcactctgcaggtgaccaccacgcagccaggcgccaccacgctggccaaaattggcgggcctgtactgtcgaaagcctggtacggcaaagggtatcagcggggaaatctcgactatctgcgctcactgcacggcaagccgctgggcaacggcccttacgtgtacgacaaatatattcccggtcaggaaattcgcttccatgccaatagccatttttaccgtgggacgccgccaacgccgcgctttatctatcgcgtgaccaatccgtccaccaacttccagctgttccagaccggggagaccgactacgacgcctttacctcgcgccccgacgatattgagcaactgaagatgctcggcttcgccaatattaatctttacggctccagcgactacagccaggtggaattcaacgtgcatcgcccggcgctacaggataagcgggtgcgccaggcgctgatttacggcctggataggcagaagctgatcgacgtggtctatcagggatacggcaaagtcgccatcgaaccgatcgcgccgatctcctgggcctttaacgctgaaggcgtcaacccttacccttacgatccggcccaggccaaaaagctgctggatgaggccggctggaaaccaggcgccgacggtatccgcgccaaagacggccagcgcctggagctgaccctgctggtgagcaagaaggtgctcaacgatgcgctgatccccatcgccaaggagaactggcggcagatcggcgtgctgctgaagccgcaggtggtggatttcaacgccctgatggcgcagcgcaaagccggaaattacgatttggcctcgttcagcaccagcaccctcaacgacccgcacgacggggtatgggatttctacagcagcgaagctaaagagtccggctaccataacgcggaagtcgataagctgattaacgccggcaacgcggtgctcgacatcgaacagcgcaagccgatctaccaccagctgtataaagtgctggccgacgatccgccggtgatcctgctcggctatcgcgagatcctttccgccagcagcgcccgcgtcagcggctttaagccggatatctacaacggcctgaccggcagcctgccggatgtaaaaatcgtcaaataaatccctggccgccgggttaaccggcggctgatgtgagaccgtcatgagaaatttcatcctgaggcgcctgctgcaaacgctgccgatgctgctgctggcctccttcattatttttttgctgtttgccaaaacccccggcgactttatcgatggcaatatcaccctgaccgctgcccgcgccgcggagctgaaggcgatctacggcctcgaccagccgctgttgacccgctacctccactggctgggacagttgctgcgcggtgatttaggcttttcgctgcagtatcagatcccggtcagccagttgctcaaccagtacatctggaactcttttctgctggccagcgtcgcgctggtcttttactggggcatcggcctggcggtgggcgtggtttctgccctgcgccctggctcctggtttgatcatctggtgagcgtcgcggtgtttgccgccatgtcgttccccacctttttcctctgcctgctgctgattaaatggttcgccgtcgatctccactggctgccggtaggcgggatgaccaataccggcagcgacgagagcggctggcagtatgtgctgcaggtggctgcccatctggcgctgccggtgctggcgctggtgatgctgcaggcgggcagcctgacgcgctatgtgcgcgccagtatgctcgacgtggtgaaaatggattttatccgtaccgcccgcgccaaggggttgcaggagcgcacggtgatcctcaaacatgccctgcgcaacgccctgctgccgattatcaccctgctgggcttcgagctgccggggctgttctccggggcgatcattaccgaaaaggtattcaactggccgggggcgggccacattcatatcgactcgctggccgcccgcgactatccggtactgatggggtttaccctgtttctggcggtgctgacgatagtcgggaatctgctcgccgacgtgctgtacgcctgggccgatccgcgtattcgggtgaggtcataatgatcctgtcttacttagtttcccgtcgccgccagcggcaggcggctatcccggcgctggcgcacaataccccctctccctggcgccaggggtggcgacagctgcgccgtaaccggctggccatgttctgcctgctcctgctggcggtgatggcggtgtggtgcgtgctggggcccgtctggtcgccgtggagtgatgatgccaccgacgccctgagcatcaaccagccgcccggggcggaacactggctggggaccgatttcctcggtcgcgatgtctacacccgcctgctgctggccgggcgcatctcgctgattatcggcctgctgaccatggtgatgtcggtgtgcctcggctacctgctcggcgccctctcgggttacgtcggcgggttaaccgacaaactgatcatgcgcgtggccgacctggtgatgactatccctgggttaccgctattgatcgtcgccggggcgatgctttctgagctcgatttttcgccggactcgcgcatttatatggtggtggtgatgctcagcctgctggagtggccccgactggcgcggctggtgcgcgggcaatgtctatccctgcgcgaacgcgattttatgctggccacccaggtgctgggtctgtcggcgcgtcgccggctgtttggccacctgctgccgaataccattccgattctggtggtgatggcgaccatggccgtcgccaacgccattctcagtgaatccgcgctgagctatctcggcctcggcgtggtgccgccgacgccgtcgtggggcaatatgatggatgccgctaacagcctgatcgatttccagcgccgcccctggctgtggatgccgccgggcatcgccatctttatcaccgtgatcgccatcaatgtgctgggcgatggcctgcgcgacgccatggatcccaatatgaaaccgaggctgaaatgaccacgccgttagtctcctttaatcatctttccgtctctttcgccggcgaacgctctcgcgtgcgcgcggtgcaggaggtctctttcaccattcaggccgggcaaaccgttggcgtggtgggtgaatccggctgcggcaaaagcgtcaccgccatggcgctgatgggcctcctgccgccgcagacggcgcgcatcgacggcggcgagatccgcttcgcggaccgcgatctgctgcggctgaaagccagacagatggccgatctacgcggtcaccagctggcaatgatttttcaggaaccgatgtcggccctcaacccggttttgaccatcggggagcagctgtgcgaaccgccgatccgccacctcggcgccacgccgaaagccgcctggcatcaggccatccagctgttaagcgaggtcggcctggcgcgcggggacagcctgatgacccgctatcctcaccagctttccggcggcatgctgcagcgggtgatgatcgccatggcgctgagctgtcggcccaaactgctgatcgccgacgaacccaccaccgctctcgacgtgaccgtgcaggcgcagatcctacgcctgctgcgggatcgggcccgggccagccagatggcgatgatgctgattacccacgatctgggggtgatcgcgcagatggccgagcaggtggtggtgatgtatgccggacgaattgtggaacaaggcgccaccgcggaagtgctacggcatcctcagcatccctacacgcgggggctgatcgcctcccgaccggtgcccggtgagcggcgtcggcggctgtactcaattcccggccaggtgccggatctggccgccctgccggcgggctgcgcctttgccgggcgctgcgagcgggcgacggcgcgctgccgggaggcgattccgccgctgctcggcgaccgccaacgtgctgcctgcttttatagcgaatttgcggaggtgacagcatgagcgaacgctatgtcattgaagtggatggattgaaaaaatattttccgctacgcgacggcctgtttggtcagcagaccggcgagcttcgcgcggtggacggcgtcagctttaatatccgtccgggcaccatttttggcctggtgggcgagtccggcagcggtaaaaccaccgtcggccggaccctgcttggcctgtacgagaagagcgccggcagcgtgaaatttcacggtcaggagctggccgacctgaccgcgcctgccctgcgcgctatccggcccaggatgcagctggtgtttcaggacccctatagctcgctgaacccgcggctgcgtattggcgaagcgattggcgaagccatgctggagcacaaactgtgcgcccgcaatgagctatatgaccgggtaatcgacgtgatgaagatctgcggcctggcgccggaacactatgcccgcttcccgcatcagttttccggcggccagcgtcagcggatcggtattgcccgggcgctgatcctcaacccggattttatcgtcgccgatgaacccatctcggcccttgatgtgtcgattcaggcgcagatcatcaatttgttttccgacctgcgcgacaaccgcggcgtcacgtttctgtttatctcccacgaccttggggtggtggagcatttatgtgacgatgtggcggtgatgtatctcgggcaactggtggaaagcgccagccgcgatgcgctgttcagccgccccctccatccctacacccgcgccctgatggctgcggtgccgaccctcgacccgcacagcgaaccgcaggcgctggtgcaaggcgagatcccggatccggccaatccccccgccggctgccgcttttcatcccgctgcccgctggccagcgaacgttgccgcagagagtctccggcgctgcgcgaggtggccccgggccatcgggtcgcctgccattgggtcgcatcctgagcgcggtcgatggggttatttatttctaaacaaccgaccgattgtgcgcggcagcgccaggatttactatccgccccgtcttgtgagacgcgcgataaatgaagcggaacatctttgtactcttttgcccaatggcttcgggcattttttctccacgcccgggagcgatcctcccggcaagaaatttagcggggcgcggtcgcccgtctgtcaaaacgcagcaatggaattgctcgtccgcgtcccgctacccttttcccgccgctaattaaataagggcaaaaaaataagacaacatgagattgcctggggtatagctttatcttattttttaagcgtgtactccctgttaaggtatcaacatcatgcttaagcgtcgcactctcaaaacagcactggcggcggttatttcccttgccgtcatggccgcgccagcatatgccaacccgggtaatggcaatggcaacggcggtgggaatcacgggaacagtggtaaccatggcaatagcggcaatcatggtaacaacggtaacagtggcgaccatggcaataaagggcaaaataaaggccagtccactgaagatcacggcaaacggaaaaactacggcaagcccgaccacgtcgacagcgatattagcttctcacgggcgcgctcccttgccgtgaactacggtctggtcggctatcaggcgctgccgccgggtatcgccaaaaatgtcgctcgcggcaaaccgctccctccggggatcgccaaaaagaccctgccagcttctatgattaacgacctgccctattatccgggctatgaatggcgggcggtcggagatgatctggtgctggtggccctgagcaccgcgatcgtcaccgccgtgattaacggtgtgtttgactaaatcacctacttattgaaaagcctcgcctcggcgaggcttttttgtgcctgatgccggtgagtgacggctcaccggcataaccagtatgataacggttcaaccaacccgggaccgactatggacaaagacacagtagtaacgctgttgaaatacaagcgctggattgaccttgccaccttacaggcgatccgcgcgattgacggaacggtacatggcgaaaagcgtcacctgaccatcaggctgatgaaccatatccatgtcgttgatatgattttccgggcgaacctgcgcggcaggccgcacggctacaccgcgctgaatacccctgagacgccaaccgttgatgagctggaaacggccatgaccgcctgtacggacgaatacattcagtacgtcagcgccatgacccccgccgatttccacgaacgtatcgccttcaaatttgtcgacggcggcgacggcaatatgaccgcgatggagatgctgaaccacatgctctttcacggcgcctatcaccgcggcgcggtgggctggatgattggcgaatgcggcggcgtgccgccgaaagaggtgctgaccgttttcctgcgcgaccatcattcctgaccgagcgaaaccattcgccgtcgattacgcggagaatcagcaggagctctgcctgatgtcgagtatggattttctggtacagggcgctaaggtgggttccgatcgtggcgataaatacgcccagatgtaaggcgtcatgccccgcaccagcagctccgccactgcgttttcggcgggcttgacgttaaagagctccatcaaggcgctgccggtgagaaacgccagtttctgcagcgccgatttccacaaatcaggatccagggtggccatcagcaccgtttccaggatctcgatataaatccggtccgtatcactcgccctaccgccgcctgtgagtcacagtttccgctgccggagcggcgcatgtggccgccctaatcagcatagttccgtcagcgaaacaataacagttccggttcgctgagcagcccgggaagcgtgacgccaccgcgctatcaagggggttcaggatccactgtcgcgggtttggatagcgccccccttccggcataacgtcagccagatcatcagggcgcacagcagggtgacgaccgccagcccgctaaacagtagcgtataagcagagtcatagctctcgcgcagcacccggagtgaaaaatcaggcaaaagcgcagccgcctgcggcatattgccggcccccagccagcctgcggcgcggtgaatcacctcgggggcatacccgtgaacgcgactctgcagggtcagggtattgcttgccgttaataccgcggagacgaccgccagggcgatcccctcgccagcaacgcgtacggtgttgaacaggcctgccgccataccggctttggcgaccggcacagcggatatcgccaggccatccatcagtccccagggaagcgccgcccccgccccacagaggatcagcgccagcaccagctgcgggaggtggttactgtgaaaagcatcgcccagcaacaccaacccgacggaggccatcatcagtcccgccgtggacacctgccccggtgaaaaccagcgggtgagcagggccgcaacggatgggaaaaccagcatcggcgcggtcagcgccatcagatacagtgcgctctgcgactcactcatcccctctccgcccataaaatgcagtggaacaataatcagcaggaccacgtagcaacagcaggtggcgacaggcaacaacagtacgccgacaaaacgcggatgacgcagcagggagagttccagcaccgggttgttcaccctccggcagcgtacgacaaacgccacgaacagcccccccgacgcgatgagcaaggccagcgtggtcagggataaaaaaccgcgggccggaataaccataagcgatgcagtaaacagcatcagggccagcgtaaacagggttaagccgaggttgtcgggtgtccgcggctcgcttttttctgccgctggcagatacgccagaccgataagcagaactatcgccgagagcagcgcaaacagggcgtatacgccgcgccaacccaccgcgtcggtcatgaagccgatcagcagcgggccaaacgccaggccaacgccgaacaccgtgcccaggatgctgaatgcccgggtccgctgagcgccatcatacagctgggccagcgccgcactgccgctggctaaaatcatcgccgcggccaggccctgcagagccctcaacacgcctgacaggaagagattgtgcgtcaggcaaaacagcaggctgctcaggcaaaacagcgcggcgccggcgataaaaatacgttttctgtcgatggtatccgccgtcacccctgcggccagcaaaaagctgccgaaagtcagcataaagccattggtcagccacgacagcgcagcgggagagccgcccagcgactgctgtatcgcgggggtggtcatgacgccgccggtaaaacttaacggcagcagcaaggccgccataaagacagaaagcgcggccagggcgctggcgtatcgggaaggtgttctggcggtgagtaacatcgggcggccctcatcagtcggcaaggaatgaataaactgtcgccatcctattgcggatgttattgccgataaatagactgaaaatatcttcttaagagacataaggtttataatcgatggacagcctcacctcgctgacgtcctttgtccgcaccgccgaaacgctaagctttgttcaggccgccaggctgctgggcatatctgcctcggcggtgggtaagaatgtcgcccggcttgagcataaactgggggtccggctgttcaaccgcagcaccagaaacgtcagcctgacggcggagggggccgcatttctgacacgctgccagagtatcctggagcagatccaggaggccgagtcagagctgaccagcagtctctcacagcccaccggcaaactgaggatttcactgcccgtcattggctaccgcctgttgctccccgccctcaccgcctttagccgtctttatccgcaggttgaactggatctcgactttagcgaccggctggtcaatctgatcgatgagggagttgatgtcgctatccgcagcggtgaattagcggactcccgcttgatcgccagaaagctgggaggctttcgttttgtgctctgcgccagtccggcctatctggcggaatacggcgcccccgactcgccagcggaattggcggcgcacaagtgcatttttttccgcttccccgcgacggggctgatccagccctgggaactgcgcggtatgcgactgacgggagatttcaggtccgctgccgtgatgacggtcaataacattgaggccgccattcgcttaagcgcggcggggatgggcatcgcttatgtgcctgattttgtcgtgcgcgaggcaatggatgagggacaactgcaggaggtgttgcccgggtgttgcatcaaggatgggcatttctcggtcctgtggcccgccagccgctatctgtcaccgcgaatacgctgttttatcgattttatggctgcggcagagatacccttgtcacccgcatcggcacccccaccccttgtatctaacaatttgaggtgattagctacccccactgaagcagagtgtgccgcccccttccctttaggtcagaaaagtctgcaccgctgaatcctgatctgcagcgtatggccctccgcttcacctttcataccagctcatctgggtgaacggttagtgggtttgaggtttactcaaccactacaacgactttgccaacctgtccatttgcttccatatagcgctgtgcatccgcaatatcctcaagcggaaatgttttatcaatgacaggtttcagtttgccggaacgtaacccttcggtgacgaaggattttgcgcgtgccattttttcagggtccgtcgtaatttcaaacagctcatatccacgcagcgtgagatgcttaccgagaatatcaaagacaggcacaagaaggtcgcggctgtctagcgcgccgtactggaagaacatcccttgcggtgccatcacctgggtcagttttgccacgtccggcccaccgacaggatcaaaaacaatatgggcgcccatgccatctgtcgcatgattgatttccgcaaccatatcctgctcagcgctagcgataacagtggcggcacccgctttaagaagcatgtctcttttttcggcagttcgggtaagcgcaatgggtttagcacccagcatgttagcaatctgtatggcagccagtcctacgctgcttgatgctgcgcggatcacaacattctgcccagcctgaaggttgccatattcaaccagcgcgccatatgcagtgacatacatcatccaacttgcagcggcttcctcaaaggaaagattttcaggatgcttcacaacagcgtgcacaggtgcattgaccagttcgccgtacatgccgtattcattaaacataaacgaagggattacgctgaccagatcgccagtggtaaacgcctcaacattctcacctacggcctgcacaacgccagccgcttcataaccaagacgtgccggaaattccggctcaataacatattggccgttgcggtacatgatttctgcacgattaagaccgatagcctgcacgcgaatctgaacttcacccgctgctggtgcgggcacctccatatcgacaatttccaaaacttccggaccaccggtgcggttaaaggtaacaactttagacatattcagctctcgtcagttatcagcacatctttcgaatattgttgaagacatgcccggtttatttactgacaatctacgctgctataaacgtaccaaaaatagctgacagggaacttcagtattaattatctgttaacaatccattggtttcagcggttctgcatggtcagaacttcactgaaccagtcgataaagacccgtactttgggcgaaaggtagtgcctgtccggatacagcaccgacacaggcttagacacagaagggtattgcgtcagaatctcttcaagagcgccggaagcaatatgtggagcaagggcgttaaaggtggcctggattatgccgaggcccgccagtccacaggagagcagaatatctgaattatcaaccagcatgctgcctacgggacgcaacgaaacaatcttcccgtccttagtaaatttccattccatcacatcacgactgtggtcgctgaaaaagtttattgcccgatgctgatccagatccgcaagtgtttccggtcgtccatattgttgcaagtaagacggggctgcacaggtgaccatcctgatgtcaccaagacgtctggaaataaaactcgaatcctgaagctcacccaggcggacaagacagtccacaccttcactaatgagatcggtttttttgtccgatgaaaccaatatgacatcaatgtcaggatacagtgactggaaatgtttgagattagggatcagtatggcgtgagccagcgccagcgggacatcaatcctgagccgcccccgaggtggaagggtaggtgaaaagctcgccatcatgtcattaacttcagacaatacaagcctggcacgatgataaaacgcctccccttcagccgtaacgctcaacttacgggtagtgcgatggatgagttttacgccgaggtcgtcctctatctgctgtatcgctttgctcacggtgggacgatgaatctgcagaatgtcagcggcccttgtaaagctgccctgctcaacaacctgtacgaaaatattaaggtattcaatcatgtttgaatgcacgtgatcacctggctttagttaggctgttcgtagctggtattgtaaagtaaacaattccgatgggcatcaaactaaggacttgatggctttcaaaatgtgcgctcctggctcgaagcgggcgtactgggtgagtttaaagtccgctgtgagcgaagagcggatattcagaccgactgatagctgattttgagttgccaaaaagagcgctcctattcagtacaaaaaagatggtaatgtttcataaaatctcttagaccttgcaggaatggttttgaaatgaatggatcttgtttgtgtggaacaattgaatttgaacttactcataaaccagcagtgttttatcgttgtcattgctcgctttgcagaaagcagagcggtgtgggttacaatctcgccacactagtcaaagacagtgagtttcgctggattaaaggggaaaactgcattgcttcatggtctaagccaacggggtaccgtacagatttttgcaatgtatgtggctcaactgtgcctaacagtctgcgagacgtaccttatgtctgggttcctgttggtttaattgacgaacgtcttgaaatggaatgtgcaggagacttctgcactgatgatgcaatgccctgggatgaaacccgctcacctagttgtcacgctggacctgtcgagtcgctagcctcgcttttaaagtacctgaaactcaattcctgagcgtcagcatttggcacaaagcagacgttaaaacctacagcatcggaaagcttctgaatgccgcgtcagcggcatggaggcgccagataaggttacatgtgtctgtggagtcaaatggcgccgaaagcccggcgtagccggttaccagcctataaattctgcctccgccctgccctggttagcctgaacccactaacagcaatcaagaaagttaaggtaatccctttaaccccggagcgctggctttacggcgtttacgacataaagggcgtgatttcgaggtccttagtcgaggtagcttgctgctgacgcttaggggatattcttcagttatttcaacgacaccagggaacttaacacggtagctgaaaagctcagcgccggagatcctgccgcccggccagcgaaagccggcggcaggtatacctctcaaggcagcatcttaccctttggcaaaattggcctggatccgctgctgcagataatcctcggcgctgatgggcgggtacttcctctgcggcccgaggatctcgacatctttattggcctggcagaaaaacgccaggctgtagcgcggcccctgatattcatgaggcagcggatttctcacccgatggaagttagacggcagctggtcgtcgctccagcgcatcagcatatcgccgatattgcaggtgatcacctcctcgcgcggctcaatgctggtccactgctggctttcgcggtctttaccgggacaaacctgcaggccgccctggccggggcgctggaacagcagcgtcagacagtcaaaatcggtgtgcgcgccggcccgccacatcccctgctgcgactgctcggttgcatagtaatgcagcatgcgcaaggtgctctgataggtgtcacgctgcggatcgtgcgcggtggtaaaaaacgattccggaaaaccgagcttcaaagcaaagcaggagaggatcttcatccccagctgccagcactgcgattcaaacccgagcatcgtctgctggaatgctggcaactcccgatcgctgggccagcacccggccatcagaggccgggttatctgatacgactctttttgatccggcgtgcgggtcgacggccgaacctgcgctttgctttcccagccggcgttaccggccagcggatactggcgcttcacctcgtcgggcaggtcgaaaaacgcctcggtcatgctgaacgcctggcggatatccgccagcggaataccgtgatggctgacctggaagaagccaatctccaccgccgcctcccacagttgttcggcaatgtcattttttcttgcggcaaagttcgacaggtcgatacagcgcacttcgcgggcgaaggtctcttcgccctcggcgcccatcagcgcctctttttccagttcctgtaaggcgtagcgttgattctgggtggttgcgttcatcgtcattatcctgttatcagttacacagcggcgcgctgttggagggtacggacggccgccagcgcgtcgtgacgcatcgcgtcaaggtcgagaccgggaatggcgtcgtcttccacgatggggcggccattgagcagtagcgccttcagcgcggcgcgcccaccgcaggccaccggcccaatggccatatcgtgcaggccgaagtagcgcggatcgtccagccggtaaatggcaaggtccgcctgcatgccgacctgcagggtgccgctctgcgctaagccgaggatctgcgccccgccggcgctgccccagcgcactacatcctccaccgtggccgcatcggccccaccctcaaaggtgcccccggcgtagcgcggctgcgccagcatccccttgcgcgcgcgctgcagcagccatgcggcatgggcttcgctttgcatatccgccgcttcattcgaggcggcgccgtccacccccagcgagaccgggaccccggcctgctctaacgccagcagatcggcgatgccgctgcccagccggccgttgctttgcgggcagtgggcgatgccggttccggtacggcccagcagggcaatctcctccggcagcagcttcaccagatgggcaaaccacacgtcatttcccagccagtcgtgttccgcgcagaactgcaccggcgtcatggcgaatttctgccgcgcggcgtcgagataatcgacggtttccgataaatggctgtgcaaccggatccccagctggcgggccagcttcgccatctcccgcagctgggcgcccggcgcggagtgcaggacggtagtgggcgccatcaccacccggcgcagagactcgggccgggggtcgtgatagcggctgaccagccgttcgacatccgccatatagccgtcgaaggtttccggacgcagcgccaccggcagatcctgttccaccgcccggccctgggtcgccccaccccggcacaggacgatgcgcatccccagcgcttccccttcgctgaagacaatctccgaggtatcgaaaggcatatccggccagtacaggtagttgtgatccgccacgctggcgcagcccgagcgcagaagctccaccagaccaatgcgcaccgccagacgaaaggtatgttcatcgaaagccgcgcgaaagcggtacggcgtggcgctcagccaggccgtcaggctctggttcagcccctgcggctcgcccttcagcagcgactgaaaaagatggtggtgcgtgttcacccacgccggatagatcacgcagtcgcgggcatcgatctgtcgctcttccggcagcggcgtcaggctgccgatggcggcaatcttgccgtcgcggatgcgaatatccggcccggccagccgcgccgcctctccgggcagaccgctgaggatggcatgggcatttttaatcattaatgacatggcgtcgctcctcagggtttaacctgcatggcctgaacaaattcggtggtgtaggcctgtttccagtcggtggccgccgccagcagaccggcgctgaccataaagtcgcgggtcttctgccagcgcgcgtcggtcatcgtcccccagccctggctggcggcatccccgccgtcgatcaggtgatgctcacggatctgggtcacgccccaggcgagcagatcgtcggtcattttcgggttgtcctgcttaatcaacgcattgcccggctccggatccttgagatagctcacccagccctccattgaggcgcggacaaacttcgccatcgccgctttacgctcggcgatggtatccgggcgggcgataaggatgccgccgtaggggggatagccgtgttcggaaaagaggaagaagttcgccttcactccggccttctgcacctggaacacctcggagctgacataggcctgctgggcgacagcgtcatcgacgacaaagggttgaatattgaaggtataggggcgaacctgcgcgtcgctcagctggtattgcgccttcagccacggccaccacgtcgcctgaccggagctggaaaccagcagggttttgtctttcagcccctgcagagaggtgacatcggcatgggtcagcagcccctggggatcgtactgaaagggcgcggcaatggcttttgcctggaagccgcgctgaatgccttccagcagctgcaggtcgtaaccgatgatcacatcggcccgcttcgacaacagcaactgcatgccgttgacctgcggtccgccggagcggatctcgacatcgagaccgtattttttgtacagcccggtggcctgagcctgataataccccccctgttccgcctgggcgtaccaggaggtcagcagaacgattttctcctcggcctgaacggccagcgagacaccgccgagggccatcaggcccagccagcgtatgccccggggaaggcgtgcgcctgttttcatatccctctcctctttacgccgggagggggagcgagcgaatgtggctcagcctcccatcccggtcaacattgaaccgcgacatggtgactgagcaatgtcccgtatggataacccgtactgaccgcttctactcacactcagctatacaaaaacaatgccagatttaaacgcctgcgagcggccgcgagaaatcgcctgcgccgccgcccttgggcatgcaacctttgattcatgctcacaagaaacgcaccataatggtgcgctaatgaatgattttagtgcctgcccgacatttcacagctggctgaagagcatctccagctggttcagcatcatcgaggcggcaagggaaagctggcgggcgggcgagacgcacagcgccagggtgaaaggcttaagctgcggatcggttagcggcacaaacgccagctggccggactcgatctcatcgagaatatccagccgacacaggatgccgatgcccatctgctctttgatcagggtgcggatcatgtgaatgttattcgataccgccacctcctttacctcgttgccgctgatgttcaccagcgcctccaccggctcgctaatcatcaatggggcggacggcaggataaaggggtagtcgaggcactgactaaagcgcaccgcgctgcggctggccagcggatggccggtgggcaccacaatccccatattcatctcggcaaacgcccggacctgcagttcacgagaggtctggggattgagcatgatgccgaaatccgcctcgccggagatcagcgcctgctggatgtggatattgttgatggtggtcaatgtaaaagagatgttgggataatgtttatgcacctctttgagcatcgtcgaaaagaaatgccggttaatggcatcgatggtggcgatgcgcacatgcccccgccgcaacccgcgcagatcgtccagctgctcgcagacccgggtaaagtcctttttccagttattggccgcgtgcaggagcagctccccggcggcggtcagcctcagcccggtgggatggcgctcgaagagcggcatcgccagctcctgttccacgcgcaaaatctgacggtcgatggaagacgccgacacatgcagcgcctctgacgctttacgaaacgatccctgacgggccacttcagtgaaatagagcagaaatcgggagaaagcaaacatggtttgggtgctctcatttttgcaacgggttgtgcgaatcaaagctctggacgcaacagttttatcacaataccgtagcattcatagcggagaaacgatcgtttcacccattttcttgcacgccggacagttcaccgcgaaggggagttatctcttcgccgcccctggccgccctgcagacagcggaatgagggagagtaaacggtaatgcacagccacgaacttatttcggtctcggtcggggaaatacgccccaacggacagggaaacctatccataattttgcagacggcggccggggaaatattaccggcctactccgccggggcgcatatcgatattattattcccggcgtcggctcccggcagtattccctgtgcggcacgcctgaccgcagtaatacttatgaaatttgcgtcaggctgactgacacctccaccggcggctcacgctatttgcaccagcagctcaaagccggcgatcggctcgccatttcgccgccgcgcaaccattttcccctgccgcaggccgggcgctacctgctgtttgccggcggtatcggcatcacgcctttgctggcgatggctgaagcgattgccgccagaaagggggcgctggagctgcattattatgtcgccagttcgcgccagacggccttctccccgcgcctgaaccagctgactgcgaacggcacggtggccattcactgcagcgaggaaggcgcgtcgcttcgccagcgggtccccgaatgcttaactgtgccccaccctgataccgcagtaatagcctgcggcccggagggttttattcagcgactgcggtcggtcatggaggaatatcgctggtcgccgtcgcagttcgtattcgagcgttttactcccgcggcggaaaataatactgcggcgaaaaatgcgttttatattgagctggcctccagcgggcagcgcctgcaggtggccgcggatcaaaccattgctcaggtattacagcacgccggggtggaggtaatgctctcctgcgaacagggaatgtgcggctcctgtattaccggggtcctcgacgggatccccgagcaccgggacagcgtgctgacggcggaagagaaagccggcaacgaccagatcacgctctgctgttcgcgggcgaaatcgccgggtctggttttggatctgtgaggagactgacgatgacgctcccctcctcttgtgcgccgctcaccggcatcagccgcgcccgactcccggcctgggcgctgcccgacggctggccgacgcaggccaacggtgaaccgctgctggcggacctggcctttcgcgacggccggatcgccgcactgaccccaaccgaccagccgactcccggcctgtgggacctggcgggagccctgacgctccccggcctggtggaaccccatgcccatctggacaagacattcaccattgaacgctgccgtccagcgcaggccgggctgctgccggcgatccacgccatgcatgaggatcgccgacactggtccagggcggatattcaacgccgggcgtccgccgcgctggcccgggcggcagcgaatggcgtgacccatttgcgcagccatatcgactggtttaacgccgacgcgccggacgcctggcaggaaatcgcccgcctcgataccgtcggcatcaccctggagcgggtggcgctggtcccgctgcccctgtttcgcgagctggcgcaagcggaggccatcgcccggacggtcgccaacagcggagagcgctgcctgctgggcggcttcatccactcctccaactgggacgccaccgccatggaaaatctgctgtacagcgcggcccgctgggatctggatctggatttgcatattgatgaggagctcagcgaagtgtctcaggggctgacctggctggcggatcatctctcccgccacccttttcccgggcatatctgctgcagccacggctgcgcactggccgccggcagcgacgaacaggcggcgccgatcctgcgccagctggcggcgcacggcgtcacccttatcgctctgccgatgaccaacctgctgctgcaggatgcgacgttcggccgcacgccgcgccagcgggggatcaccctgctgcacgaggcgcaggccgccggcgtggccaccctgctcggctgcgacaacgtgcaggatgccttctgcccggcggggagctatgacccgctggacaccctggcctgcggtctgttcagcgctcagctcagcgacctgttcgaccagcagtcgcggctgatctgcgatcgcgcggcgctaaccggttcgccggcagacgcggcgccctttgccgtcggagcggcggccagcgtggtgattttcccgggtagcgaccgttttacctggcctttaaacagcgccgcccgtctggtggttaaccacggcaggttaacccaccggcgcgtgtggcaggaggagatggcacatgagtcttgaagcaggcgccggggcgccgctggcgcggtatgccgcctggcgcagagccggcgattttatctttctctccggcattattccggtcaatcccctgaccggcaccatcgtcaacggctttcaggatgtgcctgagccggtgcgggagctgctgggggcgaccggcgaattttcaaccgatgcgaaacagggcccgatcctcgcccagagctggtacgtcctggagagcatccgccgcaccgtggcgtccgcgggagggcagatgagcgacgttatcaagctggtgcagtactttcgcaaccttgaccattttccctattacagccgggtcaggaagctgttttaccccgaccagccgcccgtttccaccgtggtgcaggtcagcgaaatgctgcccgacgccacggtactgattgaagtcgaagcgaccgtctggttacccccgtcatttaactccgaggcaccgcgatgattaacggttacattcctgccgcgcgctttcttccttttctgagctggacggacgtggccgccctgccggataaaagcaatacggttatcgtcctccccaccggggcgatcgaacagcacggcccgcatctgccctgctcggtggacagcgtgatatcttccggcgtggcgggccatgccctcgccaggctgccggcgacgatcccggcctacgccattccgccgatcgtctacggtaagtccgaggagcatctgcattttcccggcaccctgacccttagcggcgatacgctgctgcataccctgctggagatcgccgaatctctctatcgggccggttttcgcaagctgatgatgatcaacggccacggcggccagccgcagatcctgcagatcgcctgccgggaaatgcgcctgcgccacggggatttcatcgccatcccccacgacgtgttcaacgtgcccaactgcgaaaaacagtttctcagcccgcatgaacagcggatggcgatgcacgccgggcatagcgaaacggcgctgatgctggcgctggcgccggagtgcgtccatatggaacgggccgtcgctaatttccccccggaattcccctgcccaaccctgtcgaaaggccgcccggcggcggcgtgggcgtcgtatgactttggccccagcggggtgattggcgacccgaccccggcgacgcgggagcaaggcgaagggcttctcgactccctcgccgccagctgggcgcaggcgatcatcgagatccaccgcatggcctgggtcgaacgtcgcgaaccgacctggggcaaacagcactggcacggctttgtgcagtccctaccaccttctttcgctgctgaatccagggagccctgatgaataccagattgacgcccgtttttaccctgctgaccgtggccgccctcgcgacctcagcctcctgcttcgcggcggagaagtttacctttctcaccaactggtatgcccaggccgaacacggcgggttttaccaggcccaggccaccgggctgtatcaacacgccggtctcgatgtcgaaattaaaatgggcggcccgcagatcaacgtcatgcagctgatggcggccggtcaggcggactgcacccttggcgacaacggccaggcgctggagacctggcaggccggggtgcacgcggtgaccgtcgccaccgtgttccagcactcgccgacggtgtttatcacccatgacaaagtggagaacccggcggaacttaaagacaaaaccttcctgctcgccaccgaggcctatacctccttctggccgtgggcgaaaagcgagctgggtctggctggcagcaaagtgcgcccctatacctttaacgttcagccgttcctcgccgataaaaatctggtgcagcagggctacgtgacctcggagccgttctccgtcgccaaaggcggacagccgttctatgtctatccgctcagcgactggggctacccgccctacggcaactcgattatctgtatggccgacaccatccgcaaacgtccggcggcagtggcggccttcgtcaaagcctccatggaaggctggaaaagctacctgcaggatcccgcccccggcaacagcctgatcggtaaagcgaatccgcaaatgggcgccgagcagatcgcctttggcattgcccagatgaagcagtaccagctggtgaccggcggcgatgctaagtccggcggcatcggcatcatcaccgagccgcggctgaaaaaaacctgggacatgctagtgaaaaacaaactgatcgacgccagcaaggtgccgtttgagcagacttacaccctggagatggtcaaagacgccggagtgatgccatgaataccgccccgaaactgaccgtgatgagcgatacccgctttatgcccgccgctgccaccccagccatcgaggtgctgtcggcggagaaaatctacagcaacggcacccgggcgctgctgcccgtcaacctgaccatcaatcagggggagtttattaccctgctcggcccgtccggctgcggtaaaagcaccctgctgaagatggtcgccggcctggtggagcccagcgacggcaagctgatgctgtggcggcgcgacagtcgggaaaaggcccagcatccgctgtcgttcgtcttccaggaagccaccctgatgccgtggagcagcgtgcgcaacaacgtcaggctgccgctggatctggccggcgtgccgcgggcggagggcaatacccgggtgaatgaagtccttgagctggtgggcctcggcaagttcgccgacgtcctgccgcgcgaactctccggcggcatgcaaatgcgcgtctccatcgcccgcggcctggtcacccgaccaaagctgctgctgatggatgagcccttcggcgcgctggacgaaattacgcgtaacaaactcgacagcgacctgctgcgtctctggcaggagcaaaacctgacggtagtgttcgtcacccactcgatccacgaagcggtgtttctctcccagcgggtgatcatgatggcggcccgtcccggacgggtggtcgaagatatccccatccgcgagccgttcccgcgcagcgaggcgttccgcgtcagcccggccttttccctgtatgcccgtcagctgcaggacagtctgttgcaggccagccagtccggtatggagtcataatatgaaaaatacaaccgcaacgccgtggatccagcatccgcgttttctcaaaattctctatccgaccctcgtcgcggtggcgatggtgctcctgtggcagggcgcggtgagctatttccgtatcccggcctttctggtgccgtcgccgctggtgatgctggaaagcctgtggacgcatctcacgccgctgctgctggcgctgctgttcaccctcaagatcaccctgatctcgtttctactgtcgattgtcatcggcgccgcggtggcgtttatcctggtgcagaaccgctttgtggaaaccgccctgtttccctacatcgtgtttttgcaggtgacgccgatcgtcgccatcgccccgctgatcatcatctgggtgaaggatgccacgctctcgctggtggtgtgcgccaccctgatggcggtgtttcccatcatctccaataccactcagggactgcgcagcgtctcccccggcctgctgagctattttcgcctcaatcacgccagccgctggcaaacgctggtgcggctgcgtatcccctcggcgctgccctatttcttcggcgcgctgcgtatttccagtgggctgtcgctgattggcgcggtggtggcggagtttgtcgccgggaccggcgggaccaataccgggctggcctatcagatcctgcaggccggctaccagctggatatcccgctgatgtttgccgcgctgctgctgatctctctcgccggtatcgcgctgtttggcgtgatgtcctgggtctcgcgccgggcgctcagcgcctggcatgaaagcgaagccgtgcaatctcattaatgttctgctgacgaacaggaaaaagaatgatgactgatgaacagcgtcaacacgcggtcgcggcgatccagcaggcactcccggcgctggagtggaccttacagccggcgaagatcaaacggctctcccgcgattttcactggttcagtccgctactcaccgagcaactggcggggaaacaggcggacgcggtggttcgcccgcgcgatgaagaggagctgcgccagctggtctccgcctgcgcgcagcaccagctgccgctgaccctgcgcggcagcgccaccggcaactatggccaactggtccccctcgaaggcgggctgctggtggatatgaccgggctcaaccagatcgtcgccctcggcaacggcacagtgagggcccaggccggcattcgcctggcggacatcgaaaccgctgcccgccagacgggctgggagctgcgctgtatgccgtcgacctatcgactggcgagcctgggcggtctctacggcggcgggttcggcggcatcggctccatcaactatgggccgctggcggcgcccggcaatgtgctcagcgtcaaagtgatgaccgtcgagccggtcccccgcgtgctgaccgtcccggctcccgaagcgctgctgctgcatcacgcctacggcaccaacggcattatcctggaggttgagctggcgctggcgcctgcgcaccagtggattgaacgtctggacgtgtttgacgatttcgccgatgcgctgaactatgccaacgcctgcgtccgctcgccggggctggtgaagcgccaggtggcgctgctggccacgccgatcgctgactattttagccacctcaacgatcgttaccatgccgggcaacatgcggttatcagcctgatcgccgaggagagcgaaggactctgcgccagcctgttacagcgccatcgcgggagcaacgccatccgtcaggccagcgacgaggcccggacgcaaaacgcctcgttaatggaatactgctggaaccataccaccctgcatgcgctcaaggtggacaatacgctgacttatctgcagacggcgtttgatccgctgcgctatccgcagcaaattttacagatggagcagcacttcgccggggaggtgatttcccatattgaattcctgcgcgatatcgaaggcaacctcaccgccagcggtctgcagctggtgcgctataccacgcccgcgcggctcaacgccatcatgcagatatttcgcgacaacgacgtcaagattaacaacccccacgtgctgcaggttgaggacggcaaacagggcgtgattcgccccgacgtcgtggcggtgaaacagtctctcgacccggcgggattgcttaaccccggcaagctgcgcggctgggcgctgcgcgaccagctggaactggacagcaacccgctggcgcgagccacccgcgaaagccccacgacctgagcgtcccattccggggcgcgctaaccggtcgctggcccgcttctcttcctcctgcccgcgcggcgagtttttttacgccactcattcatatgaatgagtgccgtctctgtttcctccgttatactcatcaaaaaagcgacgataaatttattatcacgggttaattccgcggttcagttttcgtgtcggattaaatagttattccgaacacactctggcggattatttattacgcgctgtcattttattacaacttgccgattaccggcctgaacgacaaaaatgaccgtaaaatgagtcgacataaatttgcccctatgaattaagcatatgataaaaacgttgtaaattatttttattcaacacagcaatagtgaggataatatgagcgatgccatttcttcgcaacttgaaaacatcattacgatgctgatcgccatcagtatcgcctcggaaagactggtagagataatcaaagggtattttccctggcttaatctggaaaatcaggatccggtcatcgaaggacgacgcaaatctgccctgcagatattagcggtggttgccggtattgtgacggcgtttttgacccaacctttcgtcgccggcagtttctcggccattaaacatccggacctgatgacattatgtattggcctgatggcaagcggcggatcggcattctggaacgtcattcttaattatctgttgcaagtgaaaaacctgaaaaagcaacaagtcagcagcgtgaaaacggatccagtagccgatcctgcccccccttctccggttcatcaggacgtggttcatggcgcagagccggtcagctcaaacccctgtttcaatccggagggtaaataacatggtatggcgtgtcgcaaagagtctgctgatactcagagatcagattaatcaatatgctccgcatcgcaacacggacagcgatggcaccattggtgatgaacatcatgcccacaccaactcggatcataatccgcaggtgatagatggaaatattggtgtggtaacggctatcgatattacccacgatcctcaacataaatgtgatgctcaggcgattgtcgatgcgttggtcgccagcaaagacaaacgaattaaatatattatctggaacaaacggatcattagcgcttctgtccagccttgggtatggcgggattaccatggcgtcagcccgcacgataaacatttccacttatccgtggtgccggtgaaagcgctgtacgattacaccttaccgtggctgttatttaatccacataaagaatgatccagtttttttccgattaccgtgaggcgaatatgactcaacaaatcgacattgagaaaataaaagcggcactcaacgccattgaagaactcgaacagattgcccgttcaacgcagccggccgatattaaaaatttttgtgtggaatataacaaaacatggaaaaagaaagtggataccctgctggcgctgattgatgaacccatcagttcgctgttagttaaactggtgccttacttacccacactgctggtgattattaacatgctaaaggcgggcgttgagcaatattgtcaactgcatctcgcggaggagcctcccgtagataaataattgccacccatccggccagggcctgctcaggcactggcctccctccccactaccccatctgtccacgtttctctcagcccaacgccgaccttatcctgcgccggacagtcccgccatatggacgataagccctaccgcggcggcggtggccagtacccaggtcagcttccacttatagcgaaacagcagcccggcggcgcccagggcaatggctgcggaccacgggtcgaaaccggatggcccccagacgctatgccagataaaaaacagcgccagattcaggataacgcccaccaccgcggcggtgatggcggtcaacggcgcggtaaatcccaccttattatgggtcgtttcaataaacggcccgccggcgagaataaagataaacgagggtaaaaaagtaaaccatgtcaccaggcacgccgccgcgatgccccccagcagcacatcatcgacgcccaacaccgctttggtgtagccgccgacaaacccgacaaaggtcaccaccatgatcaacggtccaggggtcgattccccaagagcgaggccgtccatcatctgccctgccgtcagccagccatagtgggtcaccgccccctggtaaacataaggtaagacggcatatgccccgccaaaggtcatcagcgcggctttggtaaagaaccagctcatctgggtcagcggatgcgcccagcccagcattagcgtcagggcggccatcggcaccagccacagcagcatcccggcgatcagcacctgagaggtacgccgccagctgaaaatggcatgggccgggatcggcgtcgtgtcatcaatgatggcggctccgccagggtgactctgcgcatggtgggcgtccgctctgccgaatatcgtcggcgccagccgtccgccgataaaacccaccagtgccgcggcgaggacgatcagcggaaaaggaacgttcagcgcaaaaatagcgacaaaggcagcggcggcgatggcccagtaggcgccatttttcagcgcccgcgagccgatgcggtgcgccgcctgcaatactatcgccgctacggcgggtttgatgccataaaagatccccgccaccacggcgacatccccccagacgagatagatccacgccagggcgatgagtaacaccagcgagggcaaaataaacagcaccccggcgatgacgcctccccaggttttatgcatcagccagccgatataggtcgccagctgctgggcctccgggccgggcaggaccatacaaaaattgagcgcatgcaggaatcgcccttccgatatccagcgtcggttatccaccagctcctggtgcatcatggcgatctgcccggcaggcccgccgaagctgatgaagccaagcttgagccaaaagcgaaatgcctgccagaaggagacggaagcgacgacggaaggactgtcactctgcggaagaacgaccgttttgctcatgattgccagacctcatttcacaggacctcagtaagccgtcgaacagcgagcaagctgccgccagcagttggtcatcgtccgtaatggtttcccgcagccctgcaagaatgctttctacccccgccgcctccggggtcggtaccccaccgacgtccaggaagtggatcaaccgtcccagactgtcggggatcaccgcgtccagcacaaaacgccggaccagtacttcgaaggtcaccagcgtgccgacatggctgaatggcgcgccgtcaaaatcaaaaccgaccgccgtcgccggacaggtctcgggcgcggccagccacaggaaccgcgcctcgtcgtcaataaagcgccggataagccaggcgctggccagacgatcgacccacgggcgtcggcgggtggcccacagccggccgcgaaaggcgcctctgtccagcaggctcagttcgcccgccaccgactgcggctcgttcggcgatagccgctgattaatgacctgctcgatagtggccagtcgctcagcggcttgctcccgggcggcccccggaaagaaatcaatggcctcgatccgccggtagtcacgctgaattttacgcagttgtttgagctgagccgccagttcgtcgttggataacgtcccctgcagcgcctgcagatcctgcaacagcgcgtcgtactgttcacgacgatcgaatagcggcctgagcgcctcttcttccgccgcctcaatcgtgaaaacatacccggtccccccttccgcgcggatcgcctggcaggtgctgaggaaagtgtcatagccctggcgcacgtcgggcagcagatagaccccatcgcgcaggaccgctgccccgctctgcttcagggttcgccagacacgcatgcgcagcgtggcttgagacgttgtcaggttaaggatcaagagatgcattgtcatgttgtagagattactacagcatgtagcgtctgtgacgtttttacgcgcaaggagtcagatgaatttcagcaatgcatagctgaaaaaagcaaaagacggcctgcgcagcggcaggccaggcgctaagcgcgggatggggataaggggcgcagcagcagggtcaacaacgccaccgcaaccgggaccagggagccccacagcacggcgttccagccgaaggcgttgagcagaaccccggacgaaaacgaccccacgatcatcacgccgaagaccagaaaatcgttgagcgactgaacctgggtcttctcttccgggcggtggaaatcgatgattttcgccgaggcgccggtgaagccaaagttccagccgatgccgagcaaaatcagcgacagccagtaatgatacacgccgagaccgctcaggccgaccgccaccgacgcggcggtgatcagcaatcccgccgccgccattcgcactgcgccgaagcgctggatcagccggccggtgaaaaatcccgggccgtacatcgccatcacatgccactggatcccaaggttggcggcctgctgggaaagaccgtgcatatgcatggagagcggcgcggcggtcatcagaaaattcatcaccatataggccaccgcgccgctgaataccgtagtggcaaaacccggctggcggacaatctcgcgcagcggccgccctccgcgcacgctggccgcggtgggctccgccggcgtcacccctctcaacaaaaaggcggccagcactgcaaccagcgcctgagcgaggaaggtgacggcgaaggtatgtgccggccagaggtgcatggtgccggtgaccagcatcgggccaatgatcccggcggccacaccgccgcccatcaccagcgacagcgcacgggcgcgacgcgccggggcgacgccgtcggtggcggcaaaacgaaaactgagcgccacggcagcataggcgccgccaagcatcgcggcgagacaaaacagcagaaaagaattcagcactaccgccagggcggccgccagtccggtcaccatcccggcgccggtgccgagcctgaacgccgctttgcggccccgcgttcgcgccagcgcgccgaaaggcagaatggaggccgccatccccagcacaaacagggtgatcggcagcgtggccagcgacgggctgggggcaatcgcgttacccactatcgcgccggtagcgtagaagaccaccgagttggcgccggccagcgcctgagcggcagccaggcgaaagatgtttttgttctgcaccgccagcggcagcatgtgttctgtagacatccgttgttttcaccggtttgagagtggcgccaggctggccgtctggcatcgcgccctgtttgttgggttccctgaccgttaccttagccgcaaaatacgcttttgcaccatagcgaatcgcaatattacccggcgatctggcccctcttctgcgtcagatcgccgggccgggcttcgccgcgcgttttattccggggatccgtcgcgccgcgcggcggcaaatttcgccgcgatcattgcggccgtcggctggacgccgcccagactccactgctccgggtcatgttcgtcaatgcggatccagacggactgacggaactgcggatcgccctgcccctcaatctccaccagcagatcggtcatccgtcgcagcagctcacttttctgttccgcggtcatgatccctttaatggtttgcacgttaacaaatggcacgctattctccttagcatctaggtctaaaattcaaactcagagtagaaggtcaatctcgcgatgtcaaaaaataaatcactgccctacctcgacccggcgctgtgcggcctggcggaaggagccaaaatactcggcgaccgctgggtgctgctgatcctacgcgaggcgttttacggcgtgacgcgctttgaaacgttgctgtcgcacacccatattacccgccagacgctcaccacccggttaaaaaccatgaccgaaacgggattgctcaacaaagtgccctaccgggaagccggctcccgcgaacggtatgaatatgttctgactgataaaagccgtagcctggcgctggtgctgttcgccctgatggaatggggccaccagcacgtgctgcacagtgcgccgcatatagcattggtggacagcgccagcggcgaggctgtccatccggggtttattactgccagcggcaccgtggcgagccccgccgccctgcagatcgtcaaggcagacgaacgctaatagcgccgctacagaactttcgtacgcctctggcgaaagccgccgcaagcgggtatgttgcatagccacggtacccgacgagcgcgggacatttttgtttcatcgaactgtgcgataaaggatgaaggtatccggtgaccattccgacgcgcagatcgcgcatgctaaaggtagaaaatgtcgcttcgttctctgcgggctttatgtctgaccagcttttttattgccgacgtgcgcgacggcctcggcccgtttctggggatctttctcacccagcgtcactggcaggcggaggacattggcctgctgatgtccgtcggcggtatcgccggcctgctggcgaccctgtccgccggcttcatcaccgacagctcgcggcataagcgcttgctgctggccggggtctgcctggtgatcaccctcaccaccctgctgctctggtttagtcagaagaccagcgtggtcgccctctcgcaagtcgccagcggcatctgcgcggcctttgtcggaccgctgatcgccgggattaccctcggtcttgccagacagcgcggctttagcgcccagatggggaaaaacgaagccttcaaccacgcgggaaatttcttcaccgcgctaatggccggggctatcgcctggtactggggcatcggcggcattttcattctgatggcctgtaccacgctgcttaccctggtcgccctgctggcgatccgcggcggcgatatcgacgatgatgccgcccgcggcatcgaagcggcatccacgccctccctgccggggtttgccatcctgttccgccatacgccgctgctgatcgccggcgtaaccctgatgctgttccatctcgccaatgccgcactgttgccgatgctgagcatgcggatcgccgccgcgccgggacacctcaatcccggactgtttgccgccgccacggtgattatttcgcaggtggtgatgatcccggtggccatccgggtcgccggcagcatcgacaaatacggttactggcgatgcatcctgctggcgctgctgatcatgcccatccgggcggcgctggcggcgtccagcgacgccccggcgatgatggtcccggtgcaaattcttgatggcctggcggcagggattttgggggtggcggtgcccagctttatcgtctcgctgctgcgcggcagcgggcacgttaacgctggacagagcgtggtgatgctgatgcagggcgccggggcggcaatgagtccggcgttaaccgggtctatcgccgggcactactcctatgccaccgccttcggcgtgctgagcgttatcgcgattgtcgccctgatggtatggtggcgcagcgctccgctgctcaccgtctccgcgtcaccgccagtcggcgagagcgggcagtaacctacggcacagcgacctggggagagaggaaatcgccagccgggcagcagccccctgctgcccgcctgacgtgtgagtggcgttaattcacccgcgcaggcaaggtaatttgctgcagggcgttcgccatattaatctgaatcagctctttaagaccttcgcgcttaataaactggctccggtgcttacttttcacctcttcaatactctttttgatctcttgcgccggcagtttataccagccgcgagcctgtttctcaccgcccatttccagccacagcgatgaataactggctttcaccagatcgcttttcacgtgataatcagaatcgatggcgtagaccgtggagatgttgaaatatcgcagcaaaccatacagcacgctcatgatgatatttttcggccgcgcgccatgcagctctttagtcagcatcttcacttcgtcattggtgatatctttcccgccctggatgccgccgatataagcgcggccatcgtcggtgcaggaaaaacagacgctatagacgcgccggtcgccaagaaacagctgcagcatcagctccccttcctcctgaaacggcgaggccagcagcttaacgtcaagcttatcgccatttttcaagggaatagaaaacatctcgcggccaaaatccgcgacattgtagagctgcggcaggacatcagggtgaaacgttttctcgatgaaattcagtgaaccatgggcaatatccagtttgcgtcgttttgacagccgtttattgagatacgctttaaacggtttatcctcaaaaggcaccagtcctttggtcaccgcggtcaaccgcgcgcactgatatttcgcacaaagtccttgatattctctgtatttacctcctgcgagcgagagctctctgcattttcgtaaaatttttttatagcttattttgacctgaccgatcactttattatgtttacgccattctttgatggcgcctgcaacagtatgttccattgattaagatccatagattcatccataatcgcggccatattaacataaaagcgtttcgtcaacgcttaattactccttcgttgtcctttcatttaatatttaggcaggaaattatcctggcgacgttatttgtcgctaaacttattctgtcaacgattatttatggtaggtaacgccctccgctcagcgacttaacgctctgtgccttcggcgcgaagcgcggctacatccgctggcggttatgccctatacttgaccctgattcaaaaccagcaacgataggtaacttatggaaattgatctcgacaacctggtcttcagcggcctggatgaagcggaagagcgcaacgcggagcgtctggaagaagcggacaaaaaagcccaggcgatcgttgccgacgacgactgcggcgacgcctgcaaaatctgattgtcaaaccggccagcaggccggttttttttgacgcccacacctcaggtgggtaaaaaccctttcagcgtatccagcagcgcctgcgccgccttcgacagcggcagatgtccggcatggatcgcgccgacgcacttctcaatcggcggatcgctgagcgggatgcagacggcgcccaacgatgccatctgcgttttacacagcgccggcaccgcgctgccccccaggccgctggccaccattctccccaccgtcaccagctgatgactctccagcgccacgtccagctgacgtccgctgcgcgccagcgcctcctccagcatcaggcgtaccgccgaggggcgctgcagggtaataaagtcgagggtcaacagctcctgccaggtgagctgctttttcttcgccagcggggattgttggggaacgatcgccacgaagcggtccaccgccaacggggtaaacagcaggttgtggttgggcgatggctcgaaagcgatgcccatctccacccgcccctcgcgcaccatctcgatcacctgctcattaatcacgtcatgcaccgtaacgttcaccccggcatagcggtcgcgaaaggctttcagcgcctccggcagaacgttggcggcaaacgacggcatcgcggcgaccgaaattttaccccgctgcagggtaaagctctgacgcatggcctcctcgacgttatcccagtcggccagcagctgacgggccatcggcagaaagagttccccctcctgggtgagggtcactttgcgagtgctgcgctgcagcagcgcgccgcccagcgcctcctccaaccctttgatggtcaggctgagagctggctgcgacagattcagcctttcgctggcgtgggcgaaattcagagtgtgagctaccgctaaaaacgcgcgtaactgtttgacactcattctcatttttcttcctgttaactaattgaaaaaaattagttaacaggaaattaattaaaattccaaatgagtgagtcacaaattcaaaattatcaaatcagtcgcctgcgccaatgataaggctatcgcaaggcaggagagacaagatggcaggactggataaacgcgtcgccagttacgaagcggcgctggaagggttaacggacggcatgacgctgctcgccggcggcttcggcctgtgcggcattcccgagaacttgatcgccgaggtgcagcgtcgccaggtgcaggggctgacggtggtctccaacaactgcggggtcgacggtttcggtctcggcatgctgctggagtcgcgccaggtcagcaaggtggtggcctcttacgtcggggaaaacgcgctgtttgaacagctggtgctgagcggcgagctggcggtagaactcaccccgcagggaacgctggcggaaaaaatccgcgccggcggcgccggcatccccggcttttacaccgccaccgggtatggcaccccggtcgccgaaggcaaagaggtgcgccagttcgacggccgacactacatccttgaagaggcgatccgcggcgatttcgcgctggtcaaaggctggaaagccgactggtacggcaacgtggtctatcgccacaccgcgcagaatttcaacccgctgatggccaccgccgggcgcattacggtggtggaggtggaagagattgtgccgccgggcgaactgcccccctccgccatccatactccggggatctatgtcgaccggctgatcgtcgggcaattcgaaaaacgtgttgaacagcgcaccctgcgcgccggaggacactgagatgctgacccgtgaacaaatggcgatgcgcgtcgcccaggagctgcgcgacggcgactacgtcaacctcgggatcggtatcccgacgctggtggccaactacattcccgccggcattgaagtgatgctccagtcggagaacggcctgctggggatgggcgaatttcccgatgaggaaaccatcgacgccgacatgattaacgccggtaaacaaaccgtcaccgcgcaaaccggggcggcgatcttcgattccgcccagtcgttcgccatgatccgcggcggccacgtcgacctgaccgttcttggcgcctttgaggtcgacgtcgcgggcaacatcgcctcatggatgatccctggaaaaatggtcaaggggatgggcggcgccatggacctggtggccggcgcgcagaacatcatcgtggtgatgacccacgcctcaaaaaacggcgaatccaaactgctgccgcagtgcaccctgccgctcaccggcgtggcctgtattcgccgggtactcaccgatctggccctgctggagattgtcgacggcgcgtttgtcctgcgcgaagtggccccgggggtcagccccgacgaggtgatacgtaaaacggcgggacggctgatcgtcgccgacgacgtgcgcgaaatgcgcttcagttaaggagagaccatgaccgatattgccattgttgctgcagtacgcaccccggtaggcagctttcacggcgccttcgcccctctttccgccgtcgacctcggcgcggcggtggtgcgcggcctgcttgaacgctgccagctgcctgccgcagcggtcgacgaactaattttcggccaggtgcttaccgccggctgcgggcagaacccggcgcgccagaccgcgctgcgggccggcctgccggtcgacactccggcggtcaccgtcaatctggtctgcggctccggactgaaagcggttcagcaggcggtgcaggcgatccgctgcggcgacgccgggatcgttatcgccggcggccaggagagcatgagcaatgctccctatctgatgcatggcgcccgcgacggcctgcgtttcggccacgccagcctgcaggacagcatgatccaggacggcctgtgggacgccttcaacgactaccacatgggcattaccgccgagaacctcgccgacgccttcgacatcagccgcgagcgccaggacgccttcgccgccagctcccagcgcaaagcggcggctgctatcgccgccgggcgctttcgcgaggagatcgtcccggtcagcgtcccgcagggcaaaaagccgccgcgagtcgtgactgacgatgagcaaccgcgcccggagaccagcgagcagcagttggcccagctgcgcccggcgtttcgcccggctgacggcagcgtcaccgccgggaatgcctcgtcgctgaacgacggcgccgcggcggtcctgctgatgcgcgtcgataaagcgcgcgagcttgggctgccggtgctggcgcgcattgtcagctcagcggtcgccggggtcgacccatcggtgatgggcattggcccggtgagcgcctgccgccaggcgctgcatcgcgccggctggacgctggacgaggtggaccttatcgaagccaacgaggcttttgccgtccaggcgctggccgtcggtcagctgcttgagtgggatagcgagaaggtcaacgtcaacggcggcgccatcgcccttggacatcccatcggcgcctccggctgccggatcctcgtcagcctggtgcatgagatgcagcgccggggcgccagcaaagggcttgccaccctgtgcgtcggcggcggccagggcatcgccatgactctacaacgttaacaggagccactatgtttacaccacgcctggcggtactcggcgcgggactgatgggcgtcggtatcgcctgccatttcgcccgtcacggtcacgccgtccgcctgtatgacaccgacccgcagcgtctcgccgaggttccggcagtggccagcgccatcctgtgcgagctggaggccagcagtcaacaggatcccgccgaccgcgacgcggtgctggcccgtctgacccccaccccgacgctgaatgccctggccgatgccacgctgctgattgaagcgatccccgaacggctggcgctgaagcacgccctgtacgccgagctggaaacgctgatcgccgacgaggcgattatcgccagcaacaccagcggcctgccgccggatcggctggcgcagggcatgcgcctcccggaacggctactgatcgctcatttctggcatccgccgcacctgatcccgctggtggaagtggtgcccgggagcgccacgctgcctcatctggcacgccaggtgagcgacttttgcgccgcctgcgcgctggaggcggtggtgctcaaccgcgccgcgccgggctttgtcggcaaccggctgcagttcgccctgctgcgcgaagcgttgcatatcgtccacagcggcatcgcttccccggaggtggtggaccaggtgatgcgcgcctcgctgggccgccgctatgcgatggtcggcccgctggaggctgcggacatgaccggcctggcgacagtccaggatatctgccagcacctgctgccggagctggccagcggcacggagatgatgtcgctggtggcggagaaagtggcgcgaggcgacaccggcgcccgcagcgggcaaggcttttaccgctgggacgaagcccggcaccaacgcatccagtcgcgccgggaacaccagctgcgcttcgccctgaaaccctagtatcgcgttctgtacccctacaataacaatgagagtgagacgtcgtgatgagtgtgataatagccctggccgcgctggcgttactgatgctggcagcctaccgtggatacagcgtgatcctctttgcgccgatcgccgccctcggcgcggtgctcctcaccgacccgggcgcggtcggcccggcctttaccggcctgtttatggaaaaaatggtcggctttgtgaagctctatttcccggtgtttctgctgggcgcggtattcggcaagctgattgagctgtcgggattctctcgttcgattgtcgccgccgccatccgcatccttgggcgccgccacgcgatcccggtgatcgtgctggtgtgcgccctgctgacctacggcggggtgtcgctgtttgtggtggcctttgccgtctaccctttcgccgccgaactatttcgccagagcgggatccccaaacggctgatccccgccaccgtcgccctcggggcattctcgtttaccatggacgccctgcccggcacgccgcagatccagaatattattcccaccagcttcttcggcaccaacgcctgggcggccccctggctggggcttatcggctcgctgttcattatcatcttcggtttgctgtggctggagcgtcagcgccgcaaagcgcaggcccgcggcgaaggctatgggaccgacctgcaaaatgagccggagaccccggatgacatcgatctgccgcatccgctaatcgctatcgccccgctgctgctggtgggggtgctgaatctgctgttcacccactggatcccgcagtggtatggcgccagccatgagctcaccctgccgggtctggcgaagcctgtcgtcaccgaagtggggaaaatcaccgccatctgggcggtgcaggcggcgctgctctccggcattgtgctggtgctggtttgcggctatcgcaatatccgcggccggctggcggagggaagtcggacggcggtgggcggggctattctcgcggcgatgaacaccgcctctgagtatggcttcggcgcggttatcgccgccctgccgggtttcctggtgctgtcaaaagccctcgcggccattcccaatccgctgttaaacgaggcgatcagcgtcacggtgctggccgggatcactggctcggcctccggggggatgagcatcgcccttgcggcgatgtccgagacctttgtcgccgccgcccacgccgccaatattccgctcgaggtactgcaccgtgtcgccgccatggccagcggcggcatggacaccctgccgcacaacggggcggtgatcaccctgctggcgatcaccggcctgagccatcgccaggcctacggcggcattttcgccatcacggtgatcaaaagcctcgcggtactgtttgtcattgccacgttctatgtgaccggcattgtctgataccagattgaaggagtaatacaatgaacttacacggtaaaacggcgctggtcaccggctccaccagcggcatcggtttagggatcgccaaagtgcttgcgcaggcaggcgcccagctggtgctcaatggcttcggcgacagcagccacgcccgggctgaagtcgccgcgctgggcaagatccccggctatcacgacgccgacctgcgcgacgtcgggcagatcgaggcgatgatgcactatgccgaaagcaccttcggcggcgtcgatatcgtgatcaataacgccggcatccagcacgtggccccggtggagcagttcccggtggacaaatggaacgatattctcgccatcaatctctccagcgtcttccacaccacccgcctggcgctgccgggtatgcgccagcgcaactgggggcgcatcatcaacattgcctcagtgcatggcctggtggcgtcgaaagagaaatcggcctacgtcgccgccaagcacgcggtggtcgggctgaccaaaaccgtggccctggaaaccgcgcgcagcggcatcacctgcaacgccatctgcccgggctgggtgctaaccccgctggtgcagcagcagatcgataagcgcatcgccgagggggtcgacccggagcaggccagcgcccagctgctggcggaaaaacagccctccggggagtttgtcaccccgcaacagctgggcgaaatggcgctgtttctgtgcagcgacgccgccgcccaggtgcgcggcgccgcatggaacatggatggcggctgggtggcgcagtaagccgctggcgccgcgaagatcagaacatcgccagaaagcgtttcaccgtacgcgagcgctcgaagcgccgccaggcgatggcgatatcggtcttcagcggcgccccgctaagcgggtgatagctgacgttcggctgctggatgcaggtcatcgactgcggaaccagcgcgaagccgaagcctgcattgaccatgctcagcgacgatgaaatttgcgacgactgccaggcgcgctccatatcgatcccggcgcgcaggcaactgttatacaccagctcatacagcccgggggccacctcccgcgggaagaggatcggcgccacgtcgcgcagctgctccagggcaagggtcggctgcgtcgccagcggattatcgcgcggcagcgcgataaccatcggctcctcatcgataatccgcagattaaaggctttactgctctcgcacggcaggcggacgaaggcgatatccagctcggcctcgctcagggcggtcatcagattggccatattgtcttccatctggtgcagggtcaccccggggtggtcgagctgaaaacggtgcagcagcgtgaagatttgcggatggaaagcatcagaactggtaatgcctagcgacaggctgccgttcatcccgcgcgcaatgcccttggccttctccagcgccgcatcgctcatggcgaggatctggcgggcatcctcatagaaagactctcccgcttccgtcagctccaccccgcgggttaaacgccggaacagcggggtccccacttcgcgctcaagccgctgaatttgctgacttaacggaggctgtgaaatacccagctccttggcggcctgggtgaagtgccgcgtcctggcgacggcgacaaaatagcgaagataacgaagttccatatcgaaaacgtctcaaaccagcatggtttctatattggaactgtgagctgaatcgggtcaacatttatttaacctttcttatatttgttgaacgaggaagtggtatatgaatcattctgctgaatgcacctgcgaagagagtctatgcgaaaccctgcgggcgttttccgcgcagcatcccgagagcgtgctctatcagacatcgctcatgagcgccctgctgagcggggtttacgaaggcagcaccaccatcgcggacctgctgaaacacggcgatttcggcctcggcacctttaatgagctggacggggagctgatcgccttcagcagtcaggtctatcagctgcgcgccgacggcagcgcgcgcaaagcccagccggagcagaaaacgccgttcgcggtgatgacctggttccagccgcagtaccggaaaacctttgaccatccggtgagccgccagcaactgcacgaggtgatcgaccagcaaatcccctctgacaacctgttctgcgccctgcgcatcgacggccatttccgccatgcccatacccgcaccgtgccgcgccagacaccgccgtaccgggcgatgaccgacgtcctcgacgatcagccggtgttccgctttaaccagcgcgaaggggtgctggtcggcttccggaccccgcagcatatgcaggggatcaacgtcgccgggtatcacgagcattttattaccgatgaccgcaaaggcggcggtcacctgctggattaccagctcgaccacggggtgctgaccttcggcgaaattcacaagctgatgatcgacctgcccgccgacagcgcgttcctgcaggctaatctgcatcccgataatctcgatgccgccatccgttccgtagaaagttaagggggtcacatggacaaacagtatccggtacgccagtgggcgcacggcgccgatctcgtcgtcagtcagctggaagctcagggggtacgccaggtgttcggcatccccggcgccaaaatcgacaaggtcttcgattcactgctggattcctccattcgcattattccggtacgccacgaagccaacgccgcatttatggccgccgccgtcggacgtattaccggcaaagcgggcgtggcgctggtcacctccggtccgggttgttctaacctgatcaccggcatggccaccgcgaacagcgaaggcgacccggtggtggccctgggcggcgcggtaaaacgcgccgataaagccaaacaggtccatcagagtatggatacggtggcgatgttcagcccggtaaccaaatacgccgtcgaggtgacggcgccggatgcgctggcggaagtggtctccaacgccttccgcgccgccgagcagggccggccgggcagctcgttcgttagcctgccgcaggatgtggtcgatggcccggtcagcggcaaagtgctgccggccagcggggccccgcagatgggcgccgcgccggatgatgccatcgaccaggtggcgaagcttatcgcccaggcgaagaacccgatcttcctgctcggcctgatggccagccagccggaaaacagcaaggcgctgcgccgtttgctggagaccagccatattccagtcaccagcacctatcaggccgccggagcggtgaatcaggataacttctctcgcttcgccggccgggttgggctgtttaacaaccaggccggggaccgtctgctgcagctcgccgacctggtgatctgcatcggctacagcccggtggaatacgaaccggcgatgtggaacagcggcaacgcgacgctggtgcacatcgacgtgctgcccgcctatgaagagcgcaactataccccggatgtcgagctggtgggcgatatcgccggcactctcaacaagctggcgcaaaatatcgatcatcggctggtgctctccccgcaggcggcggagatcctccgcgaccgccagcaccagcgcgagctgctggaccgccgcggcgcgcagctcaaccagtttgccctgcatcccctgcgcatcgttcgcgccatgcaggatatcgtcaacagcgacgtcacgttgaccgtggacatgggcagcttccatatctggattgcccgctacctgtacagcttccgcgcccgtcaggtgatgatctccaacggccagcagaccatgggcgtcgccctgccctgggccatcggcgcctggctggtcaatcctgagcgcaaagtggtctccgtctccggcgacggcggcttcctgcagtcgagcatggagctggagaccgccgtccgtctgaaagccaacgtactgcacctgatctgggtcgataacggctacaacatggtggccattcaggaagagaaaaaataccagcgcctgtccggcgtcgagttcgggccgatggattttaaagcctatgccgaatccttcggcgcgaaagggtttgccgtggaaagcgccgaggcgctggagccaaccctgcgcgcggcgatggacgtcgacggcccggcggtagtggccatcccggtagattatcgcgataacccgctgctgatgggccagctgcatctgagtcagattctgtaagtcatcacaataaggaaaggaaaatgaaaaaagtcgcacttgttaccggcgccggccaggggattggtaaagctatcgcccttcgtctggtgaaggatggatttgccgtggccattgccgattataacgacaccaccgccaaagcggtcgcctccgaaatcaaccaggccggcggccgcgccatggcggtgaaagtggatgtctccgaccgcgatcaggtgtttgccgccgtcgaacaggcgcgcaaaacgctgggcggcttcgacgtcatcgtcaacaacgccggcgtggcgccgtccacgccgatcgagtccattaccccggagattgtcgataaagtctacaacatcaacgttaaaggggtgatctggggcattcaggcggcggtcgaggcctttaagaaagagggtcacggcgggaaaatcatcaacgcctgttcccaggccggccacgtcggcaacccggagctggcggtatatagctcgagtaaattcgccgtacgcggcttaacccagaccgccgctcgcgacctcgcgccgctgggcatcacagtcaacggctactgcccggggattgtcaaaacgccaatgtgggccgaaattgaccgccaggtgtccgaagccgccggtaaaccgctgggttacggtaccgccgagttcgccaaacgcatcaccctcggccgcctgtccgagccggaagatgtcgccgcctgcgtctcctatcttgccagcccggattctgattatatgaccggtcagtcattgctgatcgacggcgggatggtgtttaactaataaaaaaagctctgacatggcttgcccctgctttcgcgcaggggctttttttggtttgggtgtaagtgtaagcatcccggagaaacgaagcatcgatatttgagggcttctggcgttctcacttacgcttcgacacgacgtgggcaatctgactgggatgaaggtctgatttgagcgaggagcggaagttcgggaacgggatagctccattgatgactttatgctacgtgttaaaccacaggtaatggagttgctgccggagaaagtagtattctttagactgagatcttttgaaaggaactgtagttgctataaaattgaggaaccaaattttttagcttttaaaaaataaaatattatctcttttagaaattagataagcaggagaaaagctatgatatcgataataaaggacctatttagtaaccaagtgggttccgcagtcattcttactatcattggagcgattacaaaaaagtatattcagtttcatcgcagagactttttttcacgctcatcctccgagcagataaaagcagtcgaatggcttagaacctcttctgtacccatctccgatccgttagcaaaggcggaacagcagttccgcctacagtcgttcggactgcatagagattggcatttatcttataaaatcatatgcttgagttccgattatgcacagtcattgattccgtccttgaaggcagtcttgcgttatcagggcatgtacacaattactaacgggaatatataccctcataaattccataagtggataataccttttgtgttaatatcgttgctattatatatcggtgctgagatatacagaggttcttcacagagtgatggtatagagattttgaaatctctatacgtcgttattgtggcttttatagtatggtgttgggtcgctgcttgtgctctgagagtatcaagcatcagtaaaaagctcaatgcctatatcccacccgcaaacgattttaaatccaagacatacgatttcagttcaatactcaataatagatatccctagcctggctgatctgcttcccgtaaatactgatacctggcagtaagcgagatccgcttctggcacggcgcgaactgttaactgagccaaaggtccgccatgagcgaggagcggacatttttcttcgtcctctacttcgtccattctttatgcagtaacgcatagatgtatgtgtcgtcataccttgccttaccctcctcgttttcaaaggagacaaattctttaaaacatccttcacgtcgcataagtagtcgctcgcatagtttttgagaggagtaattataatcttccacccaggcatacaaacgtctggcgccttttactttaaataaataatcaaacagtgcagcaactgactcgcttgcatatccctgatgttcaaaacgttgattaaaatgccagcctactgaccaggtattgttgtctggttcgttgctattgtccgcaaaaagatgtccgattaacgtatcggtttcttttagacaaacggcaaactgtgttgggtcagaggctcgtttagccacgtcgacctctgcctcagcgagtgaatgtaacttttcatccttaaagcaaggagtacgtggtgaagagaggtaattgaaaagagctgccgcatcctcttccttaaaatggcgaatgattaatctttgagtggtaatgatggtcataatgtccttgataatgtaatgtcagccagttcagcaagaagtctgctttaaactggccggaacacagggcagagattagccgttccggctattccccagtctgtattttcgcatgcctgtaaatcgtgtgatcgtcacgaaaaataccggaacaaagaaaatggccagtagcgttccgctaatcatcccgccgaatacaccggtaccaatcgcatgctgcgtgctgtcgctggctccactggcaagcatcagcggaacaacacctaatgtgaaagctagagaagtcatcagaattggccgtaagcgtagctttgcagccgtcaatgtcgcgtcaataaggctctttccttctttcatcaattgtctcgcgaactcgataatcagaatcgcattcttggcggaaagtccaatcagggttatcagacccactttgaaaaagacgtcattcgtcatatttgtaacggatacggccagcacagcgccgagcagccccagaggaacaacgagcatgaccgcgaagggaatggaccagctttcgtaaagagcagccagcaccatgaataccaccagtaccgagagcacaataagacccggaagctgtgatgcagactctttttcctgtaacgaacttcccgcccactccccggcgaaccccggtggtaagtgcttagccagattgtccattgccgccattgcggtacctgacgattttccctgtgcggaactcccggttatgcgtatggcaggatatccctgatagcgtatcagttgctgcggtgcaacattccacgaaagcgtcacaaaagcggataatggaagcatctgccccagacggtttttaacagacaaagccaaaagttgttcaggctgcatccggtatggcgcatccgcctggacgataacctgctgaacccgaccattattggtatagtcattaacataattggaacctgctgcaacggaaatggtttgatttatttcatcaaacgaaacccccatggcttccgctttttccctgtcgacatgcagggaaaggcttgttccctcaccaagtccatcaatatagacatcggcaaggtgaggattatgatttgcctgtacaataagctcatcggccgcctttttgagtgcctgatagcctttcccccctctgtcctgtaaataataagtgaacccggatgaggttcccatatcagaaatagccggaggcagcagactcatcgttacggcgtcaggcacgtttgccatttgggactgaatatggtcagcttcttcctgtgccgtggttcctttgcgttgtttccagtccttgagggtggtgaatgccatggccgaattttggcctgatcctgagaaaccaaatcccagaatcataatgttactttctaccgcctgccgatgggcgatctcctcttcaaatgtatcgacgaccttaagcgtccgctgcatcgtggcatcagaaggaagctggattgaggacataaaataaccctgatcttcatcgggtaaaaatgatgatggtaaggtggacagcccggcaaacaatgccaaacataatgcagcgtaaatcatcatcatacggccagtacgcttcagtacaaatcccagaccagtggcgtaaaacgaagtcaggcgatgaaagtgagcgttaaaccacgctgaaaatacgctgcttttaccctgatgaataccatgtggtttgagcagggttgcacaaagcgcaggcgttaacgtcagcgccaggaatgccgacagtaaaatggatatcgccatcgaaatgctgaactgtcgataaataatacccacagaaccgctggcaaaggccattggtataaacaccgcagtgagcaccagcgtaataccaatgattgccggcgtaatttcacgcatcgcttctcgcgttgcatcctgtggagacatttttttgtcttccatcagtcgttcgacgttctccaccacaacaatagcatcgtcaacaataatcccgatggccagtatcattccaaacatggttaaaatattgatggaataaccgcttaatagcattacggtaaatgtgccgagcagcgccacgggtgccacaatcgcaggaataagcgtacagcgtatcttgtgaaggaaaagcagcatcacgaaaaagaccagaaccatggcttcaacaaatgtctcaactaccttcaatatcgatagctttacaaatggagccgtatcgaaaggcacggtgaatgtcattccctcgggaagcacaccggacagttctgttaaccgcgcgcggatacccgacgcagtactaatcgcatttgcgccaggagacaactgaatggcggcagccgttgcaggcacgccattttcacggatgccaaatgcgtaactttgcaacccggattccacgcgggcaacgtctgccagtgtcacccgggcggctgagacctgtgatttaatcgtgatattgcgaaattcttcaaccgaagagagctgcccttttaccgttattggataggtcacctcttgactgctcgtcgcgggttcatctccggttctgcccggtgaaacaatcacgttttgttgactgatggcgcttaatacatccgtaacagagagcccatagctgtgtaatttcatcgggtccagccatatgcggagtgccttttctccgccaaaaagctggactttacctacaccaggtacgcgacggagttcatcagtaacattccttgcaaaataatcgcttaagtcagcttcctgataggctccgcttggcgattttaaccccaccatcattaaaaaaccggaattagctgcctcaacatttatcccattctgtcttaccgactgcggcaggcgagattccacaattttaatttggttttgcagatccatctgggcgagtttgatgtcggtaccgggtttgaaagttaccgtaattgacgccatccctgtcgtgtcactggaagattcaaaatagagtaaattgtcaacactcgaaatttcacgctcgatcagagacacgacggatgtgttcatcacttccgggctggctccagggtaactcactgaaatgataataccgggtggcgcaacttcagggtattgcgcaaccggtaaacgaggtatggaaaacagtcccgtcagaacaataaacagggcaataacccatgcgaagatggggcgctcaatgaaaaagtgcggcatcaggtgtacttccagtcaacatacaaagggtaaaagttcagcatggttttcctgataaagaggtctcatcgtcagtcgaaacccgtttaccgatatccctgagctgggaaaatttctcaagaagttgtggtgcgtcatcaaggcttgttgcaaacatccacatataggtcatgacggaataaatatgtccggcattaattccggattccatgctcatcctgataatggtcatggaaaagagagcagaaaccagaaggcctattgataaatatccccatgcctctctgtcggataacaccacgcgcaaacgggcaagtgtgtcataatgtcgcttaagagcaccaaaagacgccttattaacataatcgacctctttctcaaggcgattattcagccgtctgtagaatgtctcatttttgctggcatagcttgagacaaaacacatcagtattgccacgatgatcaaacaggctatacctgtccagaattcaatccataacagcataattgctgcgccgaaaagggaaatgatcgaggtgatcaatacgggcaggtgcaactcgaagaaatctacaaattcacgtgatagagtgactctcgcagcaatagtcgagtgattaagtgaatattttcgctgggataatactacagtcacagcaagacttgcgtagatacgtgcaaacgttcgcgtatcgacactacgtctggcggctcccatgcaccacatgaacagaaccatcaggccataaagagccgcatgtgacgtctgtccgcccaggatggcatttatcgccatgcccgccagaacggggtagagcaggaatgcaacgttttcagcaataaccagcatgaaagtaatgcacaatttctttctgtgccgccaggcaagtctcttaagtgagatagcaaccccgggggccataggtttgtcgttgcctttataaatcatgataaattatattaaacatctgtgtgtaaagggttctgcagttggtttattatgtcagctaagtgaaacgagacagcagaacagagcagtcataaatccatgtgctaagtgtaacgtgatgatgtcaatcgtgaatggatgttttatggaggatatgtgtactcactcctgaggttatgtatcatattgaaattgcataatatcaaaccattcttatacataaacataaaggtagtccgcaaaagaaaaccattaaaaaaaattcataataaaaaacaaaatcatagatatctggaaaagtattcaaaagcagatgtaatacaatgatggtgtgtataaacactaaaaccagaccgaatgttattgcaatgaagtttttaaaaactccaggttttttctgaataataaatgataatgctgtaatgattatcaaaacacgaatcagtaaagatgagggtaatgttgattctactttttcattaattgaatgcacaaggtaaagccaggtagatagcaacccatatgaaacgatgcaaaataaaagtgaggccatcaaattctcgcgccggaaaaaacatttagtcagcaccataaaactccttagacaaagtacatattgcatgcaccacttaacctggttgtagattatcacttagcgatgttgattaattatttataaaatgtgtagtgaatatggagagtgagtctggtaaaattttaagaaaatttcttgatgaacttttccaaaaagtacctgtcaaaagacatcaaattgaaaattaatgtttgtaattgagttaaagagctttaagcatgacgataaaagtgctttcagggtaaaatgcatgttgtcatcagcactgtggaagaaaatatgaacaacaacaatctgattatcgtcgcagaagacgatgatgacatcgctgccatactgacaggctatttacgtaaggcaggtatgaaaaccttaagagccgaagacggtgagcaggcaatcaatcttacccgtctgaacaagcctgatctcctgctattggacatccacctgcccgtgtacgatggctggaatgttctcaccacgttaagaaaggaaacgaatgtaccggtcatcatggtgacagcactggatcaagacgttgataaactgatggggctacggctcggggctgacgactatgtgataaaacccttcaatccatctgaggttattgcccgggttgaagctgtgcttcgcagaaccagaccggttgcagagtctacacattcacggcctttaagaacgccttttttaacgatttatcctgatgagttttacgttgaaatcactgcacaaggtgaggtttccacgccagtattaaccaccactgagtttaagcttttaacctatttggcgagaaacccgagaaaagtctgttcacgtgaagagttactcgatgcgtgtttacctgagggagactcgctggatcgtactgtagacagtcatatgagtaaacttcggaaaaagcttgaacatgccggattgaagggcattccggaaagcatccgaggattaggctaccggttgggtgacaaaaaatgaacaaagaaacgattctgagccgtcagattttgacatatatgttgttgttaacgtttgttattattgccattgcaatactcggttcctacctattttatagtttcctgatttattacctgccgggtggaatgaacgaaggtagtgaagatgctatgacattccttgactggatgtggattctgatggcgtccattacctgtctggtcgttgcacttttctttaccgtaaagctgtctgcaagaatattcaacccactgaatgacgttgcatacagcctgaaacaaatctctcagggaaaccttagtgccagagcatttaacagcagttctaagttgggagagatgaataggctcgtcaatgactttaatgagatggctgaaaagttacagacgctggatgcgcagcgaaatttatggaatgctgcaattgctcatgaactccggacgccggtgactatcttacgtgggaggcttcagggactggttgacggcgttttcgaaccagaaccgtcgttattcagaaaccttcttaaacaaactgaaggtctgaccaacttaattgaagatctccgcgtcgtgagttcttcaggaggcgcagggtactccttgatgctgagtgaagtggatctcaaggccacgatttcaaatgcgcttgataccttttggccggactttgataaaaagcatttcaaaattgtcactgagattaaccagcagtattgcgtttgcgatcccttacgcattattcagtgcctcaccgttctttttgacaatgccttaaaatattccacatcacaaacgctgttaataaagaatggtattacaggaaacgataattttattatcgttcaggaccaaggacctggaattcctgaagaactccagaagtccttattccagccttttcagcgaggagaatacgccaaaaatattaatccagagggctgtggtttagggttgtcggtagttaaagccattatgtgcgcccacggtggagacgttagctatagtttaacaccagaaaatggctcacttttcaaactctcatggcctgtttaagggcatgaatacacaggctcgatcgaacctgttttagcaagagacagatcccacatactgccgagttttgcgtcccaaattgatggagtgattttaagtttgcctcttttggggcttaatgttatttcgctgaaatagatatcatctccttttagcataagatcgacgcggcagtagtctatttcttttgctaagtcctgggcggcaataacggatttatgaaatgattctggttcatcaaccggcaatggcgtgtttgggtattccatctgaaagggttgtaaattccacgctctgtcataaacgttaatgaattcgtttccatcgctgtcagtaaagtcggcctcgataaaacatgccacaccgtgaaagcaatgtattcttatcatttccggagttatattccggtgtttactggaaaatagatccagatacatttcgcataggatcacgggtggtatgtttttatactgccattctcgggtcgtataatacatgttctttttaagagatagttttaatttgcttttaaccttagcgggatcaatattcgttttatccgtgcatatgaccgcgctaccactatcatgattgcatttcaaaacaaattttgagggaagtttgtcgaaatcaatatcatcaactctattataaacacctactaaaggaataagcttaattaaattagggaaggtgcgaacaagttcctgatatgagatcatcatattcatccggagcgcatcccagagggacatcatgagccatcaactcaccttcgccgatagtgaattcagcactaagcgccgtcagacccgaaaagagattttcctctcccgcatggagcagattctgccatggcaaaacatggtggaagtcatcgagccgttttatcccaaggcgggcaatggccgacggccctatccgctggagaccatgctgcgtattcactgcatgcagcattggtacaacctgagcgacggtgccatggaagatgccctgtacgaaatcgcctccatgcgcctgtttgcccgattatccctggatagcgccctgccggatcgcaccaccatcatgaatttccgccacctgctcgagcagcatcaactggcccgtcaattgttcaagaccatcaatcgctggctggccgaagcaggcgtcatgatgacccaaggcactttggtggatgccaccatcattgaggcacccagctctaccaagaacaaagagcagcaacgcgatccggagatgcatcagaccaagaaaggcaatcagtggcactttggcatgaaggcccacattggtgtcgatgccaagagtggcctgacccacagcctagtcaccaccgcggccaacgagcatgacctcaatcagctgggtaatctgcttcatggagaggagcaatttgtctcagccgatgccggctaccaaggagcgccacagcgcgaggagctggccgaggtggatgtggactggctgatcgccgagcgtcccggcaaggtaaaaaccttgaagcagcatccgcgcaagaacaaaacggccatcaacatcgaatacatgaaagccagcatccgtgccagggtggagcacccgtttcgcatcatcaagcggcagttcggcttcgtgaaagccagatacaaagggctgctgaaaaacgataaccaactggcgatgttattcaccctggccaacctgtttcgggtggaccaaatgatacgtcagtgggagagatctcagtaaaaaccggaaataacgccagaaatggtggaaaaaatagcctaaataggctgattcgatgtgtttgcgggaaaaaaatcggcccagatccgcgaaattttaatcagcgagtcagcttgggaagaaatgacctgcttattcgcaccttccttagtccgtttctcaacatactgcctgaccagaagtttatcagcaagcaatgtataaaatgggttgtggataaataaaatgcgatggcaaattttctcattaagcgttacagggttgagtaaatccggatatgtgccagatatttctcttaacctgtctgcatgaaatgaaatgtcattagtcaaaattgttctgcattttcttaacaaatattcaatgtatttgatttgatagtttattttgttcataacgcctccggttcagaaaggaaattctgacagaggtttgttgatttattttttgcaaattatggagagtatatggaccgacttgcttctttattaacagaaattaatccggaccattgtccgcgccttgcacgaatcggaaaagttaactgcactgaagatccgctctgaacgaagagcggatcttcagtgcaaaagaacagcaaggcccgcctttattattaataatgccttatctacaactgctgagttacccagctaccattttcagcgaaaaataccgtcgcatcggctccattgaccagggatatttgaggaggtatgtggccaatatcaacatcatacagtacgggcacggcaatattctcaaaagcggctttaagggcatccagataattatgtttagtcgggtcgcttacgtcgggtgcagcacttctgccgataagaacaccatttaagttatcaaaccaaccctgtaatcgtaagctaaataatgcgcgtgttaattcatagggagccatttccacgttttcaaaatagaggattattccttgagggctattgctcgccttgaacaagggcacattcccgaatggtgtacctgctaacctggatattatttcgaggcagccgccgatcagtttcccgctaaatgtcagagaagatgtaacaccatcaaggcgtttccactgtgttttttgggtcagattgaaacctccgtctgacgctgttccccattgattttcatccgcttgaaatgctgttgaagagtactgtttgattacagttccccgattcgattccagaatttcccatacggcctgagtggtggcatctaacttttgagcgccaagatccatgaggtttggcccatgcaaagtagcccagcccgatatcgtcgtcagtgggaaatgaagtgtactcagatctgaaaagcccacaaaccattttggtttagaccgggacaacagatcaaaatcaatcaaatcaagcaattccatcgccagatcaccgccccaaggtggcataacagcttttatatctgggtcagtaagataagacattaattcttcaacgcgggaaaatttagtggcgcttttatttttgtgctgcgagcgtaagcagcgtccttcgcggacctggtaacctcttttctttaggttttttatggcgagttccagtctgggatgcagatgttcaggtacgccagcagagggagcggttacaccaataacatctcctggagccagcctgggtggaaagaggacactcatggatagatccttttcagaacatatagaattccataatctataaataaagccaggatgtaaaattaacaggcgaacactccgcttgttttttctatgagcctttaaaaggtctgctcatggcacccaagggactttaccggcgtagatgatgcgtcaggcgactaatcctcaaaagtgcttactgcttattcgcgggaccgccggttgatttgggttggctcatgacgactactcttttagctattcccggtttccccttttcaaagcgccatttactcatcattttctcgatgattttatgttcaaactccggagtcgttgtcgattccagtatctttacattctgaactctgccatctgaatcaacatcatactgaatccgcagagcattcggcaggaggtttccgttcttatcatgagtggtaattgctgcgtttgcagaggaaatgctgcctgaaggtgtgctggcgctggccggtataccggcgcagagtgccaggaacaatggcagaatcagggtgaatagtctgatagcttgcataaatcgtccgaattccaaaattaaccatgaatcttcacgttaccaacggcgcgagtgacaggctaccagatgaaatgatcagtgaataccgcgtcttcagcggcaatcccttggacctacttaccaggcgcttcgtaccacatccattcccggggtcgtttcgctatcaggactagtgggagctgagcgagtatatcaacgattcttttgccagctgccagcagcgctatccggttcgtcggggaacatgaccgagctaacaccctcaagtgattagcatttattcgcgtcccgcgctgaagacgttcagctaatcctttttgacttctgtgttcgggatctaccgcggttgcgacgttaagagggtgttctccgcgggcttagcggcagcttgctgctgatgctaagggggagattcttcagtcatttctgcgacaccggggaacttaacccggaagcggctgaacatagcgccagcagggaggatcccggatagctgtgcgtgacgccttatcccggctacgctgttgtgccgctcttgtggcgtatttttgccgggtggcggctgcgccttacccggcctacaaaaactcgctagctgactgactggctcgcgccgcgttgagtgttacatagtgatgccatctcttcctgctcctggcattgagcggacaaaccagatgagccaaaggtccgccatgagcgaggagcggaaatttgccacgcccacaactacgttactaacattgaggtgtcgtaatcaacggagagcaggtcaaagtcattttagctgcatcaagggataagagttcgtggtactggaaccgtcagtatagagctcggtaataattatttttttaccatcaatagaatatttgactgtactgtccgcaggatcatcccgccagcgaccggtgatgtcagggttatcagatgcccacataacctgatcacctataagtttacactttattgcccaacgggtgccatcgttctgtcggatataatgtacgtaggcaatacctgattccactttatccagttgcatgatcttatggtcacggccaaacatcgcagcagaagccgccttgcaaatctgacctaccgtgacttcagaagcctgtaccggcgcagtaaacaccagtggaacaagaagtgaaagttttttcattcggctcaatccattttgtttattttcaggaataacgctaaatgtatatgtcggcaatctaaagcgtttcttgacgctaatctagtgttgcgatggcaggattgattaacttagtccctagcgtaatctcatgctctgcctgattgccagcttggctcctttggcacactccacattgcgattcatacagaatgttgttagccacttccacacttgagcacagaagaaattcatgctcagcaaggtccgggcggtgcaaagagcggacgttaattttgaagcttttaagatctacctgcagtggtaactgggcatattgatcattgcgattagacagcgaaccactatcccaggagatttatagacatttccatgcagcgcagttcagcctgcgccaaggcagagggatacatgctttcctgcataagtttgaaaccatgtttctcataaaaagtctgggcattaggtgttgaggacaaagtcaattgctcaaaaccacgtccacgagcttcacttttgatggcttcaataatctgactacctaaacctttacctgtatattgaggtagcgtaaatacagcctcaatacttcctgtagatagatcaagatagcctgtagctaacagtctgccatcaggggcagcaacaacgaaaaaaggattcaccacaatggcgttcctgtagctctcaggcattttttccggtgtccaggctgcaataaccgcatcatcataactactcttacatccgtaacgtatagcctgatttcgaatgttccagcattcttctgcctccacaggcacagcaagtctgatcttcataccttttccttgtacgttttattctgcgaaccatttacatctaccataaaaattctaaagcatacccatcaaatttgagtgaggcggcaacgtccgctcctggcacacagcagacatgaaattctggaatagcattcgtacacttacaacatcgagaggcttctgaaagccgcgtcagcggcatgacagcgccagcagagaaaatcccggatggcggcgcatggcgcctaatccgggctacgctgttgtgccgttattctgcctggtgacagctacgccttacccggcccggtgatttggcgctcaattcgcgcccttcgtaggcccgcgcaagcgtagcgccgccgggcaagggcagcgggtgcggagccgcttttgtgccgggtggcggctgcgacttacccggcctacggtccgtgcgacttgtcgttaatttattcaccattgttgctgaaactgccggtgttgcggcctcaaaatcgctgagacgttcggggcagcccgcatggatgcgggctgagggccgtgttttgcacggacgctgcctcggtccgacccgaagcctgcagggataagtcgaaggcaccacgaagtggcgattttgcttgccggagcccgggggtacagggggcggcggcgactggccgccccctgtgcgctccctgcgccatgccaggcataacgcagaagattaaccgggagcgcaaaatacgctgaagccacagataacataaaagacttcccggcagtgctttccctcacccaggccttcttccggagggagagagaaccgtacggcattcgttgccgttccatgacgctccctgcgccacggagaaccaggtgcagcaccacgaagcgggagcacagagtacgctgaagtcacgcgtgagaaacgctttcccgggctgagaaccaggaaaccgataatagtctccaccaccgccggcaagaaatcaggctccgagcccaacatgttgccgggtggcggctggcgccttacccggcctacaaaggctacccgcgatttggcgctctattcgcgcccttcgtaggcccgcgcaagcgtagcgccgccgggcaaggacagcgggcacggagccgattttgtgccgggtggcggctgcgcctgacccggcctacaaaaccagggctgaccgtaccgccctcgcggcagaccccacgttcagcgccgccgggcagttactgcgcctgctgctgcgcttgcgccagctggcggacgatcgccgcgcgccgcgcatccccttccggcagccgggccagtaacgcctgcagggccgccacggcctcggggtaatcttcattgcgcaccgcgctcagggccagcatctccagcaccggcaggctgttcggctgccgctgatgcaggtcgcgcagcagcagctcgcccatccgaacctggccgctatctcccgcccgtaccagcgcgctggcgtaatcgaaagccgccgccggctcgtccgccgccagagcatgcgcccggccaaaggcgccgatcgccgtctcgccatcgtttaacaacaggcccagccgcccaagcagctgccagccggcgaggtcgttcggggtatcctgcaggtggctgcgcaggccaagccgcagctccgccagctcatccattcgcagcggcgccgccgtcgggtccttaacctgctgcaacagcgcaggataatgccgttcagcctgctgccagagcagcacctggccaatatcgctggttttcagatacaggccgagactcaggaccaccagcagcagcgcgcccggaaacaacgcccagcggtttagcggccgttcgccaggcagcggctgcggcgggatatcggtcagcagcgtgcgctgaagctcgacgaccagcgccgggttgtcctcgccgcgctcctgcgccagctcctgcaggcgcgactggtacagggcgcggttgagggcatcgcggtctaccgcccctttgcccgaccacgggaagtacagcagccccagcgcaccagccagcagcagcgcggcgataactaccaacaggctcatcgttcttttccttcttgcaataatgccgccagccgctggcgctcttcgacgctgagcgccgcgtcaggaatgtcgcgacggcgcgcgcgggcgataatcactcccgcgcccgccagcacgaacaaccccggccccagccacagcagcaccgtgcccgcggtcagcggcggctcgtagctgacaaaatgaccgtagcgggccaccatatagtcaacgatctgccctttcgttttcccctgctgcatcagctcgtacaccttctgccgcatatcagcggcaatcatcgcgtttgagtcggcgatgctgttgttctggcatttcgggcagcgcagttgggaggtgatctcgcggaaggcctgctcctgggcctcatccttaaactgccaggtatcgatggcggcccacgtctggccggtcagcatcagcgccagcaggatgactattacacgtctcatcagcccgccctccggttgtattgatcccacagcggctggagctcctcgcgccacacccgttcgttcaggtcgccggcgtgccgccagcggataatgccctgaccgtcgatgagaaacgtctccggcgcgccatagaccccgagatccaggccaagcatgccgttgccgtcgtaaaggctcagcctgtagggattacccaggcgctgcagccagctcatcgccttctggcgatcgtctttgtagttcatccccaccacccgcacgccctgctgcgccaggccgttgagaaactgatgctcggcgcgacaggttggacaccaggtggcccagacattgagcagcagcggcttgccgtcaatcagcgtccgtcggtccagcgtctgaccgggggtattcagcgcttcaaggcgaaattccggcagcggtttgccaatcagcgccgactcgagggtcgtcgggtcatcgccctcggcgttgcgcatcagttgccagaacagcgcggcggccagcgccagaaacagcaccagcgggataaacagtagcttccggttcatgaggcctcctgcagcttcttacgcatccggtagcgcggatcgagcatgcagcacagaccgccgagggccatcagcaccccgccgtaccagatccagcgaacgaacggtttatagtacagacgcaccgcccagctgccgtcgctcagctcttcccccagcgcggcgtacagatcgcgggtcagcccgtcgctgatcgccgcctcggtcatcatcatccggctggcggtgtaaaagcgtttctcggcatacagcgtcgcttccgggcggccgttgcgggtcacggcgataatgccttcgccgccggtccagttggggccgacgatattgcgcacgccgttaaacacaaagtgatagcggtggatatcgatgctgtcgccggggcgcatccgtacatcgcgctccacgctgtagttctggctgaaggtgatgccgataacggtcaccgccacgccgacgtgaccgagcaccatcccccactggctgcgggtcagagtgcgcaggccgcgccagaagccgtggcgatgggtggcccgttcgtgaacctccatcagggcgaagatcagcacccacagggccatcatcaggcctatgaccgccatggcggtgatacggtcctgcagcagccacggcagcgccagagaaagtgacaacgtcaccagcagagcgataatcaggcgcttaatctgcctggcgacgtcatcgcgccgccagcggatcagcggccccagccccagcagcagcgcaaacggcgccatcagggcggtgaacatggtgttaaagaacggctcgccgatggagatgctgccgaggcccagctctttatgcaccagcggcagcagcgttccgaggagcaccaccagcatcgcggccatcagcaagatattgttgccaagcaggaacgactcgcgcgaccacagcgtatgttccacccgcgcccgcacccggcctcccttcagggcgtacagcagcagcgatccgccgatggcgacaatcagcagtaccagaataaacagcccgcgcgacggatccgaggcgaaggcatgcaccgaaaccagcaccccggagcgcaccaggaaggtgcccagcaggcacagggagaaggcggcgatggccagcagcaccgtccaggcgcggaagctgccccgcttttcggtcaccgccagggagtgcagtagcgcggttcccaccagccacggcataaacgaggcgttttccaccgggtcccagaaccaccagccgccccagcccagttcgtagtatgcccacgccgagcccagcacgatgccgagggtgaggaacatccatgccgcctgggtccagggacgcgaccagcgcgcccaggcagtatccagccggcccgccagcagcgaggcgatggcgaaggcgaaagccaccgagaagccgacgtaacccatatagaggatcggcggatggaaaatcatgccgatatcctgcagcagcggattgaggtcgcgaccatcaatggggtactgcggcaggccgcggctgaacggattggaggtgaagaggataaacagcaggaaaccaaaggcgatcatccccatcaccgccagcacccgggcgacggcgtcgagcggcatccggcggctgaagatggcgacggcgaaggtccagacgctgagcagcagaacccacagcagcagcgagccctcgtgcgccccccaggtcgccgctacccgataccacaccggcagcgcgctgttggagttttccgccacatagcggacggtaaagtcattgaccacaaaggcgtgcaccagcagcaggaaggcgccgccgatacaggcgaatagcccacaggccagcggccgcgccagggccatcagccgccgatcctgccgcgccgcgccccacaggggatagacgctcaggagcagcgccagccccgccgccagacacaataaaaagttgcccagttccggcatcatggctgcgcccccgttttctctggcgtcatggcgtttttcacctccggcggcgtgtaattttcatcatgtttggccagcacctgctgggcggtaatatgccgctcgccgtccagtacgccctgggccaccacgccctgcccttcacgaaacaggtccggcagaatgcccttatagctgacgtccaccaccccgcgggcgtcatacagcttaaagcgcacgtcgagggtttgcgggtcgcgctgcagggagcccggctgaacgtagcctcccacccgcagccgctgaccggtatggggcagcgcccgggtttccgttttgccgtagataatttcccccggggtgtagaacagatcgatattgctgctcagggcgtacagcgtcaggctgacggttagcccgaggccggcgagcaccgccagcacgatatacagccgggttttacgacgcgcttgcatccgcggcctccttgtcatgttcgcgagcggcagcgatccgccgctcgcgcgcctgctggcgtcgcacctcatggaacagcgcccgccgcgcccacagggtatgcaccgtcagcaggccaaaggcggcgacggtcacggccaccgccagccagacgtacacggcatagccgcccatattcaggaaggcggcgaaagacgaaaaggcggggctcatcgggcggctcctttattcaccagcgccaccacccacggtcgacggcgctccagctgcaggatcaggttacgcaggcgcatcagggtcagggtgaccgacagcgtgaggaaggcaaagatgcagatccgcagcggcagacgcatacttgggtcgatggtttgctgcaggttggtcgagccctggtgcagggtgttccaccagtagaccgagtaatgaatgatgggcagattgaccaccccgaccagcacgaggatccccgccgcgcgcccggccagccgccggtcgtcaaaggcgtgccacagggcgatgaccccggcatacagaaacagtagcaccagctctgaggtcaggcgggcgtcccagatccaccaggtcccccacatcggcttgccccatgccgcgccgctgaccagcgccaccagggtgcagaccgcccccaccggcgccagggcggcgatcgccagatcggccattttgatctgccagaccaccccgacgaaggccgcgacggccatcgccaggtacagccccatcgaccacatcgccgccgggacgtgaaggtacatgatccggtagctttccccctgctgatagtccgcgggggcgaagccaaagccccaccccaggccgatgaccagcaacagcgcgctcaacgccgccagccaggggatccagcatccgcacaggcggtacagccgctcggggatcgccagttgatgtaacgctttccacatagacgcttactcacacggttatgatggccgcgcccgcaggcgcagcgagttatcgcacggtcagccgcagcgcagcggcggtggcgaacggacacagggtggcgctggcggttaagaacgccgccagcatcgccagatagccgctgaccgggagcccggcggcggccgcctggcaggccgcggtggcgaaaatcagcagcggcaccgccagcggcagcaccagcaggctcagcaggacgccgccgcgcttcaggccgaccgtcaggccaacccccaccgcgccgagaaaactgagcgtcggggtgccaagcagcaaggtcagcgccagcacaccggcgtcatgcagactcatccccagcagcagcgccgccagcggcgagacgatcagcagcggcaggccgctcatcatccagtgggcaaccaccttcaccagcaccaccgccaccagcggcgtcggcaggagcatcagttgctccagggaaccgtcctgccagtcgtcgcgaaacaaccgatccatcaccagcagcgccgccagcagcgcggcgacccacaccacgcccggcgcaatctgcgccagcagctgcggcgcggcgcctacgccgaacggaaacagggtgatgacgatcagaaagaaccagagcggattgaggatctccgccccgctgcgccacgccaggcgcagttcccgggccaacagcgcacgcatcattgcccgcctccagcgtcgccgccgaggcgcagggtgcgcaacggacagcccagcggccgcagcggctggtgggtggtgaggatggcgcatcccccctgccgggcgtgctgctccaggcgacgggtcagggtttccatcgccgtggcgtcgagggcggtgaacggctcatcgaggatccacagcggcgcgtcggttaaccacaggcgggtgagcgccacccgacgctgctgcccggcggagagctggctcaaggggagatcttcatagcccgccaggccgacggcggcgagggcgctttcccgctgctgaaggcgactggccggaaagaagaaacgcaggttttcatcggcggtcagcgccgcgttaacgccgggtttatggcccagccacagcagctgacggtgaaatgactcccggaccttcgccagcggctggccctgccagctcaccaccccgctttccgggcgcgccaggccgcagaggatccgcagcagcgaggttttccccgcgccgttatcaccggcgacctgcagcagctcgccggcagcgagggacagcgtcagcgccgcaaacagcggtcgatcgtcaacgatgcaggtcagtcgctctgcatgcagcatgaaggcaaactccttgattcagacagtattttacgtcgtcgctaagtatgggttgcgccgcgcgggcgacgcaaccctgacgcttactgtccggcccccggcagcttcgagatatcggcgttgcctaacgccttctcatcatgcgccgcagtctccttacgcaccttcgccacatcgctggcgctgaccgccggcgcgttgttgccccagctggtgcggatgaaattgaccacatccgccacctgctggtcgtccaggcgccagccgaacgacggcatggtcaggttggagaccgcatctttcaccgccggcgtggtgctcccggtcagaacgatgtggataagcgaagtggcatcttccgtctgtaccaccgggttgcccttcagcgacgggaaggcgcgtttatagcccgcgccgtcggtacggtggcaggcggcgcagttatcgacgtacagcgcggcgccggttttgctgtcgttacccttccacagatctttcgccacgctgtcttccaccggggctggggtctgtttgccgccgcgcggcgggagcgacttcaggtagcgggcgatggcggtgatgtcgtcatcagagagatactgcagactgtgctccaccacatcgctcatgccgccgaagaccaccgatttatcgttgcgtccggttttgaggaactcggccagctcggcttcgctccaggtccccagaccgtcgcggttttcgccgcgcaggctggaggcgacccagccgtcaatcggcgcattgctgcccgccaggtaatcatcgccttcgctttcgctgagcgctttttcctgcatcgtcaggctacgcggggtatgacaggcgccgcagtggcccaggccttccaccagatagcggccgcgctccagcaccgggtcaacctgcgggttggcgacaaagtcgctcggcgtcggggcgaagatgccgcgccagaacgccagcggccagcgcatcgacagcggccatgggatgtcggtgtccttgttggcgacattcaccggctccacgccgtgcataaagtaggcgtacatggcgcgcatgtccgcttcgctgatccgcgcgaacgagggatacggcatcgccggatagagcgtggaaccgtctttccgcacgcccttgcgcaccgcgtcgtcgaactcttcgaaggtgtacccgccgatgccgtgttctttatccggcgtgatattggtggagtagatggtgccgatcggcgtctccatcggcaaaccgccggcgaaaggtttccccgctttgccgttggtgtggcaggcgacacagtcccccgcccgcgccagatactccccctgcttaatcagattgctgtccgcaggcgcctcttcggcaaaagccgcgcagctcaatgccccaagcaccagggccgataaccattgcattttcatcatctgccttcctttatgcctgcaccaggggacccggatttttcagatactgctcacggatcgccttcgctgaccagtaggccagcgcggccaccgtgccggttgggttgtagcccagcccctgcgggaacgcggaggcgccgatgacgaagacgttatgcacgtcccagctttgcagataacggttaacggcgctggttttcggatcttcccccatcaccgccccaccgttcatatgggtggtctggtaggtggtggtatcaaagtggctgttggcgttttttgggctgccgaggatatatttcggcttcatcgctttggcgatcggcgccatcttatcgaacataaactgcgccatcttgatgtcgttttcctgccagtcgaaggtcatgcgcagcagcggctggccaaagacgtttttgtagttcggatcaagatcgaggtagttctgccgataggactggtgcgcgccgtgggcatccatcgacaggtgatgggtgtaggtgtcggccaccgccgctttccacttgctgccccacgccggggtgcccggcggtaccgggaaaccggagatgggcttggtcccggcctggttgacccagaatggcgaaccgccgacaaagcccgccgcgccgtggtcgaagttgtcggcgttgaagtcgtcgacgccgacgccgttgccgcccgcgccgataaacggattggtataggtgtctttgtcgaaaatggccttgatggtggtcatgttctggtaggcgaagttacgccccaccaccccttcgccggtctccggattgtacggtttgccgatcccggagagcagcatcaggtgcacgttgtggaactggaaggcgccgacaatcaccaggtccgccggctgttccatttcgcgcccctggccgtcgacgtaggtcacgccggtggcgcgggatttgtcgtcggtcaggttgaccttcagcacgttggcgttagtccgcagctcaaagcgtttttcctggcgcagcgccggcagaatgttcacgttcggcgaggctttagagtacatgtagcaggcgtagccgctgcagaaaccgcagaagttgcacgggcccatctgcgcgccgtaggggttggtataggagtcggaggtgttggccgacggcaggttataggggtgataccccacttccagcgccgctttttcaaacagctgcgccgaccaggtgtttttctgcgccggcagcgggaagtcgtccgagcggtccggggcgaaggcgttgccgccgcggcctttgccgacgaccttgcctttgatcgaccaggcggtcccggaggtaccgaatactttttccgctttatcgaagaacggttccagctcgtcgtaggtgacgccgaaatcctggatgatcatatcctgggggatgaagtttttgccgtagcgttcttcatagtggctgcgcatccgcagctcaatgggatcgacgcggaaatggacgccggaccagtgcagcccggcgccgcccacgccggtacccggcaggaaggccgccagctggcgatagggcaccgcctgttggctggtgttatgccggatggtgacggtgcttttcgacagatcctggaacagcttgcggcggatgttgtaggtcagctcatcaatcacctgcggataggcgccgtccggccaggtgtcgcgcatcgggccgcgctccagcgcgacgacgttgagccccgcttcggtcagctctttggccatgatcgccccaacccagccgaagccgacgatcgcgacatcggtttttttcaatacggtggccatgattacgccctctccccattaattgataccggcgggaaggggtagcgttcgccccgttcaacccagtccataaagtcggcgcgcgcgccgggaaaattaatcagcgtccagccgaccatgcctttattgccgccatggatcgggtcgctgaagaacccttcgcgggtgttttgcagcagataggtgaagaacagcgaggccggcagctgtttgaactcggctttacccgattcccacaggccgagcgcctcgtcctgctgctcgctgctcagttcagcgaaggttttatgatatttgtcctgacaccacgcctcggcgtcggcgatcccgaggttatagatctgtttgggcaccagcggcagctgataacccatctctttcggcacgtcgggattgaagggcccctgcatataccagatggagccggtggcgtaaggggtattgagctggcggtcgataaactccgggacgccggcctctttggcgccgggaccgagttcatccgccgggattaagcgagcgacggcggcgttgataaacgcccactcacgatcgttgaagaactgcggcttccagtcgctggccgccgcggtgttcccggaggctggctctgaagcgggggccgcctgcgcggtcgcgctggtggccacgccaatagcccctgctcccgcgccgccgatcaccaccgtcgggatcagcgccatcgatttcaccaggaaatcacgcctggaattgttggttttctcgctcgacatcatcacattcctgtcactgaaaattactgtttttgtcgctgacaaaaccagtgaatgtcgtgctggaaccgataccattgcgcttttaaaccgcttagcgtctggcccggcccggcaagtcggataaaacatcgccagaggcgatatcatttatagggttatcgtttggatagtagacgattctcaacgaaacgcgggaaatcggagagaaattcaccggtctgtcatcgtgagaagagtgctgccataaccttgaggcggtaaaccagcggcattcacaccgcgctgagcttacccatgcgccaaaaaagagtgacttgtatcacaaatgttattttttgtttatggtacatggcagattaaacgtctgtaaatactcgtattaggaataattaaacattttgagctgttaaaaaagttaataaccgttgttaactatcttgtatctattgtccggctagcgccttcagctggtgatataccatccacaggagaaaagaagatatgttcgatcatgtgaaattcggcgttagcgactatgccgccagcaaagcgttctttttgcaggccctggccccgcttggcgtaacgctggtcggcgaaggcgaaccgagctacggcgcagagctggccggcagcggtgatgcttctctatgcctctatcaaagtgcggaaaaaccggcgccgctgcacattgcctttcgcgccgacagccgcgagcaggtcgatgtcttctggcaggcggcgctggccgccggaggaaaggacaacggcgcgccggggctacggccaaactaccacgccagttactacgccgcgtttgtgattgcgccagacgggcacaatattgaagccgtgtgccatctggcggggtaacgggcggctaccgctgcggaaaaatccacacatcctccgccgggagcgtcagatggcagtgttcggcatcgcgcagcgccgttccgtaggcgcgcagcggaaagtcgtcgccttcggtacggaacaggtactcccagcggtcgccgaggtacatgctggtcagcagcggtagctggaggctgttagcctgcgctgcgccgtcgagtcgcaggcgctcgacgcggatcaccgccgtcgccggctcgccaacgctaaccccctcgcccgctcgcccccacaggctccagctggcgccttcgatccgcgccctgccgttctccagcgccatcactttgccgtgcaggcggttattgctgcccataaactcagcggcgaacagcgtcgccgggctgccgtacatctcctgcggcgtcccctgctgctcaatgacgccattgttcagcagcagaatacgatcggagatggccattgcttcattctgatcgtgggtgaccatcagcgccgacaggcccagcttaatgatcagctcgcgcagaaacacccgcgcctcttcgcgcagcttggcgtcaaggttggagagcggttcatccagcaggatcaccggcgggttgtaaaccagcgcccgaccgatggccacccgctgctgctggccaccggagagctggtgcggatggcggttgccaaggtgccccagccccagctgatccagcacacgctgcacccgctcttttatctccccggcggcgactttacgcagcttcaacggataggccacattgtcgaacaccgttttgtgcggccacagggcataggactggaacaccaggccgaggttacgctcttcggccgggatctcgctgcgcggcgtgccgtcgtacaccgtgcggttgccaatggcgatccgtccgctcgtcggtttttccagcccggccaccgcccgcagcagcgtggttttgccgcttcccgaaggccccagcagcgatactacctccccccggccgagcgtcatggacacccccttcaacaccgggttgtcgccataggtgagatgcagattttctaccgataactcaatcatgtaatttcactccaaagcgcagggcgataccaaggccaatcaccaccagcagaatattgataaaggagagcgccgcgacgatatcgatggcccccgccgcccacagcgacaccagcatcgagccgatggtttcggtacccggcgacagcagatagacgccagtggaatactcgcgctcaaagatcaggaacatcagcagccaggagccaatcagcccatagcgcgacagcggaacggtcacgtggcgggtgatctgcccccgcgaggcgccggtgctacgcgccgcctcctccagctccgggcccacctgcagcagcgtcgaggagatgagccgcaggccgtaggccatccacaccacggtgtaggccagccagacgctgaagatggtgttgcgcagggcgcgcagctgcacgataaggtgctcccgcagccagtcggccaccggcagcgccgagagccagccgtgcttcagcgactgatcgagccacatcggtacaaacaggaatacccacaggaaggccaggccggccagcagccccggtaccgcgcgcgggaccagcacgctgtagtcgagaaagcgggtgacgttgtccgctttgcggtgcatggcgatgccgacaaacagatagcagatcaccgccagcgcgccgccgatgatgccgatagccatcgagttgacgatcgcccgcagcaggttgggctgctgccagatattgtggaacgtcgccagcgacagctcatcccacagcgacacgccgacgccccagttggagataaaagcgcgcagcgccacgccgagcagcggtacgccgatggtcaccgtcagccaggccaccaccaccgccccggccacccagcgccatttgcccagcggcagcgcccgcgcctgggacgccttgcccttcatggtgacaaagcggttggcggtgcgcatcagccgccgctggagcatcaccagcgggatggtgatgcagatcagcaccaccgccaccgccgccatcagatggtaggagggggtgccgagcttgttagtcagcttgtagagataggtcgccagcaccatgttgccctcggggtcgcccagcaccagcatcagaccgaagacttccagaccgaggaaaaagagcaacacgcaggcgtaaagaatggatggccgcaccatcggcagactcaccgaggtcatcacctgcagcggcgtggcgccgacggtgcgcgccgcctcttccacgtcggagccgacgctgcgcagcgccgaagagatatagagataggcatgcggaacgtgagttaagccggcgatgaccacaatgctgaacatcgagtagatattccacggcacaaagccgatcagctgctgcgcccactgggaaaagaagcctaccggcccggcggccaccacgtagccaaagcccagcaccatcggcgagacgaagatcggcaccaggatcagcggctcaatgatccgccggccgggtaaatcggtgcgcaccatcagaaaggccaaaataccgcccagcggaatggcgataatcaccaggccaaaggccagaataaaacctgaccttaatgccagataaaaatccgggtcggtaaaaataaaggcgaaggcttccagactccacgatttggagcgggaaaagaacggtgccgaaagaaaactctgcaccacaataaataacagcgggacataaatcaccagcgccgtgatgcacaccaccacgccgcgcggcagcccctgccactttctgcgtaatacgttcatggttcatcccttcggtcaggtgtataaacccgccgggtgtgaataggggcatcggcgatgccccaggggaggattatttcgcggcggcgctgcgccattgtttaataaactgcagacgtttttgcggctgtaaataatcgagcagcgtttcgttgaccgggatcggttttaacgctttgcccagcagcgcggtcatgccgtcgatatcatttttacctgcaatatcgcgacgaatagagggaatatccgcctggctggcgaggatctgctggcctttttccgacaggacataatccagccacaatttcgccgcattgggatgttcgctctcctggctaataaacgagacgcgggagagcaccagcacgtaatctttcggataggcaatacctaaagagggatcgtttttcgcccgcgcttcggcataagagccaagaatgttatagccgatcaggttttcgccggaggagacgcgctccatcattgtgccggtggaagactgcaccgtcaggccgcctttggcgatattcgccaggtcggcaaaatagttcgcgtcggcctggctgtcctgtaccgccagcataaagccgaggcccgatttttcgatatcgtaggtggtgactttgcctttaaatttatcggcctggctggcgataagttttgccagcgcggtatgcgaatccggtacctcattctgcgggatcagccgtttgttatagataaacaccaccggctcataggtagtgccataggctttttgctgccagaccgcccagtcgggtaattgcttcacctccggcgaggcatattgttcggcgtattcggtggctaatttcagcgcggtatccatcgatgagctccacaccacatccccgctgccgcccccggcggcctgttcgctgatatagcggttatacagctcggtactgttcatgtcgttatattcgactttgacgcccgggtattgcgcttcaaatcccttaattaacggcccggccgctttggtatcggtcgtggaatagaccaccaccttgccctcttttacggcggcatcaatcgttttttgataatccgcgggatagcccgcaggcacctccgcccaggcggcacaggcgaaaacggccgtcagtgaaaccactaaaccacttattttcttatacatgataccaacctttaatcatcaattaataaacacaaatttaacatatagtggtatcagctccccttgcaacgacggggatggcttttttctggcttttgtgacactggcagaatttaaaaatgtggtgtttatggcgttaattaaaacgcgatcccggcccggttttttatcgtctgtcgtatgcgcaggcgctggcgcagcggcatgtcgccgggagacgccgcccttgaccttctgcgccgggcggcgcagcataaaacggcaaacataacaaaataacaacagactacaggagagaatcagtgcctacaggacaccgctttctggcgacggatctgcatcagtttgtcgtctcactgtttacccatctcggcagtaccccaggggaagccaccctcgtcgcggaccatctgatcgccgccaatcttgccgggcatgactcccacggcgtcgggatgatccccagctacgtcaaatcccacgccggtggttttctgcagctcaaccgccacgccacggtgaccaaagacgccggcgccgtggtcaccctcgacggcaacgccggcttcggccaggtggtcgcccacgaagcgatgcagttaggcattgaaaaggcgaagcagcatggtatggcggctatcgccctgcgcaatgcgcatcacgtcggtcgcatcggctactgggccgaacagtgcgccgccgccgggctgatctccattcacttcgtcagcgtcatcggcgacccgatggtcgccccgttccgcgggaaggacagccgcttcggcaccaacccgctgtgcgtggtgtttccccgcgcgggccatccgccgctgctgctggactacgccaccagcgccatcgcctttggtaaaacccgcgtcgcctggcataaaggcgaagccgtggcccccggctgcctgattgacgccgagggtcgacccactaccgacccggcggtgatgcagacctcgccgctgggcgccctgctcaccttcgcccagcacaaaggctatgccctggcgacgctgtgcgaagtgctcggcggcgcgctctccggcgggcaaaccacccatcaggagagcctgcagaccagcgtcgacgccatctttaactgcatgaccacggtgatcctgcgcccggacgcgttcgatgccccggacagccaggcgcagacggaggcctttatcgcatggtgtaagcagtcgccgcacgatgccgatgccccggtactggcgcccggcgaatgggaggccgccaaccgcgaagcgcggctggcgcaggggatcccgctggatgccggcagctggcaggctatctgcgccgccgcgcgcgacgtcggcctgagcgaatcgcacttcgaccgctgccgccctctcgcctagccgcgttttactcccgcagagcgtctgacgtcggcgctctgcgtcatcgtcattagtgacgaggtcatgctcccgtcatcaatctcttttcatttttcaatacagatcaagagtttaaattctggcacaagacctgcatagcgcaacaggcctgcgtctgcatcaccaccaggcgataccgcgatcgttgcccgtcgggcccggcgcgacagcgatcctcagttcactgttaacaggtctgttactgatgaaaaaaatcacgagcgtgtgcccctactgcggggcgggttgcaaacttaaactggttgtcgacaacaataaaatcattcgcgcggaagccgccgacggcgtcaccaaccagaaccagctgtgcctgaaaggctactacggctgggattttcttaacgatacgcagctcctgacgccccgtcttaaacaaccgatgatccgctaccagaaaggcggcgccttcacgccggtcagctggcaggaggcgattcgctataccgccagcaagctcagggagatcaaagagaagcatggcccgcgcgccatcatgaccaccggctcctcgcgcggcaccggcaacgaaaccaactatgtgatgcaaaagttcgcccgcgcggtactgaacaccaataacgtcgactgctgcgcccgcgtctgccacggcccctccgtcgccgggctacagcaggcgctgggcaacggggcgatgagcaactcgattagcgacatcgaaaactcgaagtgcctgctggtctttggctacaactgcgccgactcccatcccatcgtcgcccgccgggtaatcaaggcccgggacaacggcgccaaaatcatcgtctgcgatccgcggcgcattgaaaccgcgcgcattgccgatcgtcatctgcagctcaacaacggcagcaacatggcgctggtaaatgccttcggctatgtgctgctggaggaggagctgtacaacaaaacctatgtcgaacgctataccgaagggctggatgcttaccgcgaggcggtgaaggattacgccccggaagcggtggaagggattgtcggggtcagcgcgcgggaaatccgggaggcgatgcgcatgttcgccgccgccccatccgccaccattatgtggggcatgggggtcacccagtttggccaggcggtggacgtggtgcgcggcctggcaagcctggcgctgctcaccggcaacctgggacggcccaacgtcggcgtggggccggtccgcgggcaaaacaacgtacagggcgcctgcgatatgggcgtgctgccgaacctgttccccggctatcaggaggtcaccgaccccgccgtgcgggcgaaattcgccgccgcctggggcatcgacccggcgctgatggacgaccaggtcggcacccgcatcaccgaggtgccgcataaagcgctgaccggcgagatcaaagcctattatatcatgggcgaagatccgctgcagaccgaagccgacctcggcctggtgcgcaaaggcatcgaggcgctggacttcgtggtcgtgcaggacatcttcatgaccaaaacagcggaaatggccgatgtcctgctgccggccacctcctggggcgagcacggcggcgtcttcacctgcgccgaccgcgggttccagcggtttgaacaggcgatccctccggcggggaatgtgaagcgcgactgggagatcattagcctgctggccagcgaattgggctatccgatgcactatgagaacaaccagcagatctgggacgagatgcgcgagctctgcccgctgttctacggcgtgacctgggagaaaatgggcgatatgggccatgtccagtggccgtgcccgaccctcgatcatcccggcacgccatggctgtataaagacaaccgcttcgacaccccctcgggtaaagggcagctgttcgccaccgcctggcgcgcgccggcggagcgcccggatgacgagtggccgctggtgctgtgcaccgtgcgggaagtcgggcattattcctgccgctcgatgaccggcaactgcgccgcgctgcagtcgctggccgacgagccgggacgggtgcagatgaatcccgcggatgcgcaacgactggggatcgccgacaaacagctggtgtggatcagctcccggcgcgggaaggtgatctcccgcgccgacctcagcgatcgcatcaatccgggggcggtctatatgacctatcagtggtgggtgggcgcctgcaatgagctgacccaggataacctcgatccgatctccaaaacgccggaaaccaaatactgtgcggtgaaagtggaagcgattgccgaccagcaatgggcggagcgctatgcctggacggcctacagcgacatgaaagcgcgactgaaagccgctgccgacgtctgacctcagggagcgcagcgcgctccctctgccgctgccggtgggttacgccgccggcagctgtttctccaccagccccacccacatggcgaccccggggccgatcagcgcatcgttaaagtcatagctggcgttatgcagcggcttcgacggggtttcgccgtcggtgcctatccagaaataggcccccggacaggcctccagcatgcaggcaaaatcttcggaggccatcgacggcgcctgattccagcgcaccgcttgcgcgccgagagtggcggcagccacctcgcgcacctgctgcgcctgcagcgcatggtttttggtcaccggataacccgggaaccagctaatctcgccctgcacatcggacacctgcggctgggtcgccacatagctttcgataagctcccgcacgcgggcgcgaacgcgattgctcaggcagcggaaggtaccgcgcagcaccacggtgtccggcaggacgttgatcgcctcgccgccgtttatctgggtgatgctgaccaccgcggaatcctgcggcgacaagcggcgggaaggaatggtctgcagcgccattatcagctgcgccgccgcgacgatcggatcggccccgctctccggcatcgccgcatgacagctctttccgcgcagggttatctcgaaggcgtccagcgaggccatcatcgcgccatcgctgagcgccacttcgccaagagggatccccggccagttatgcagcgcgtagatggcgtccatcgggaagcgctcaaacaacccctcctccaccattttgcgcgcgccgccgaggttctcttccgccggctgaaagacaaagtggacggtgccgctgaaatggcgggtctgcgccagatgggcggcggccgccagcagcatcgcggtatggccatcgtggccgcaggcgtgcatcaccccgggacggcgtgaacggtagctgacgctccccagctcggtgatcggcagggcgtccatatcggcgcgcaggccgataaccggcccggggccgttctccagcgtcgccacgacgccggtgccggccagcccgcgatgcacctgcagcccaaacgaggccagcagctccgcaacgcggcgcgaggtctcctgctcctgatatccgagctcaggcgcggcgtgaaattcacgtcgccagccaacggcttcggcgatcagtgacggcgatacggccatgtattactcctttcctgcatagcgtaatgctgaataatcggtcatgcgtcgcgtttttccccgtcgctcaccggcgtcggggcgctgccgctccctccgttatatcctgtcgttaccacgctgacaacgtcacgaaatgcggcggcggcgcggcgtacagcccacctgccgccctgcggcccttttttggtagtgatttcaacggtgacaacggccagtcgattaattattatgcaactcaggacggcaatttgccgaaggatccactactgacctctccgtcatcggaaataaaatgtttaacccagaccagactcgtcttgcccccacgctggcgatgatcatggccgcgtcgctcgtgggatttatcaccggctatacggtgccgttaatcagtcttgagctggcgcagcagcagatcgcgccgctgtacgtcggcctgctggccgccctgccgcccgccggcatgatgatctcctctttcctctctcctgcgctgtgccggcgcgttgaaatgggcgtgctgctgagcggcagtctgatcctgctggcgctggcgaccatcgcctcatgcatgactaccgatatgacgctgcttttgctgccgcgcctgctgaccggcctggcctccggggtcattatcgtactcggcgaaagctggatcactggcggcgcggcgggcagccagcgcgctaccctcaccggtctctacgcctcggcctttaccggctgccagctggccgggccgctgctaatctccgtcggccccgcctggcagacctcagcgctgatagcgattgtcgcggtcaccgccgtctgcctgctgatgctgcgccatctgcccaccggcactcgtgaaagcctcggggagcgcgccagctggcgcagcctcggcgcctttctgccggtactggcctccggggtcttctgcttcgccttctttgacgccagcatcctcgccctgctgccgctgtacggcatggacaaagggctgaatgaagggctggcggtgctgctggtcaccgtggtgctgaccggagatgcgatgttccagaccccgctcggctggctggccgaccgggtcgggattcgccgcgtgcatctgagctgcgcggtggttttcagcctgtcgctgctggccctgccgctgatgctcggttcgcgcattcagctgatggccatttgtctgctgctgggcgccgcggcgggcgcgctttataccctgtcgctggtgcgggcggggaaaaccttcaatgggcagaagctgattatgattaacgccctgttcggctttttctggtccgccggcagcgttgccgggccggtagtcagcggcatgctgatcggcatcactggttacgatggcctgatcgtcaccctggtggccagcggcgtgctgttcctgttgattcagtgtctgtgcaaaaacgagaaaaccctgcttgccagtgagcaggaagatgacatggacgaggcgacggagtccgcacggtagtcctcacgggctggcctggcgccagcccttttttatggccctcaccggagggtatcctgttcttgctggctcactgctgttaaccattgccggcccccagccgagaggaaatcccatggaaagtaataccttacatcgtggcagattgatcgatcatattctgctggttgtcgaagactttgaggcaagcaaaaacttctataccgccgtactgtcggcgctggagatcccggttatcaccaccgccaatgaatacttgctggccgacgaactggtgctggcctcacgccacagcccggaggctgccgggaaactgactgggcgccaccacctggcattccaggccagagatcgtgacatggtggacgctttttaccatgcggcgctgacccatggcggacgtgataacggcgcgcctggcgaacgacactatcatcctggttactatgccgcttttgtgctggatccgcaggggaataatattgaggcggtgtaccatggcaaggctgagcgcagcgccgggtctgttgcgatcagcttcacgcagtaagcgggcgaaagtcacattttcttacctgcgcaattcccataataaatgtgggtgttatcatttccttgatgaataattcatacccatagctgaggcgtcgatgctggaaaacctaatcatctgataatcagacttccgaccatcactggccggactgattatcactgcgctgaaatcgaatgcggacactggcgagtgttcgcctattttgcccatgatgatgacaaaggtttcccggtatgaatgtttcccctcaggagcaagcgactttattcattctcgtcccctgcggacaaacgctccacatccacgcgatggcagcgagacccctccctcgcataagaaacgtcacccccagccagttaacccggtgcgttatccctctgccatgctcgatcactccctctgcatgccgttgcgttgccttacccaatgaccgtcgtcaggcgaattttatctttcgatttgtcattccgcggccagcctgtgacgacagtcgcaagggatccacatcaaccaggccccgataccagggaaaccgtcaccgaccagggagtcttcgcgtatgaaattagcgttgggaccgtacatccgttttagcagaatcttgttatttccgctggcgatggttatctatgatttttctgcttatctgactaccgatctcattcagccgggtattatccacatcatccgggaatttgaggctgatgttgcgttagccccggcctccgtcagcctctatttagccggggggctggccttacagtggctgctggggccgctctccgaccgcattggtcgccgccccgtactactgaccggagccatcatctttgctttggcctgcttcagcatgatctttgtcacgtcgattgatcaatatcttatcgcccgttttatccagggaaccagtatctgcttcatttcgacagtcggttatgtctccatccaggaggcttttgatgaaaaagagtctatccgcattatggcggcgctgacatccatcgttttgctggcgccggtaatcgggcccctggcgggcgctggcctgatgaatttcctgcactggaagttattgtttgcgatcatcggcgccatgagcttgctggcctgggcgttattgatttttaacatgccagaaacggtcacctctcagggccgggggtttcgtccgggagaggtattttccgagtttgtccgcgcctttaaacagccggtggtgctcacgggcgcgctggcgttgtcattcagtaacctgccgataatcacctgggtagcactctctccggtgatcctgatcgatgacggcgggatgtcgcgcggcgcctatgcctggacccaggtgcctgtctttggcggcgttattattgccagcatcatcgtggcccgttttatcaaggatccgacctctccccgctttatctggcgcactatcccgatacagctgaccgggttgttggtattactggcgggaaatattgcatggccccatacctggtggtggtccgtttcaggaacgagtctctatgccctcggaacaggcctgttgttccccgtattattccgttttgcgcttttttcccactccctgccgaaagggacggtttcagccaccatcaacattgtggcgctcagttttatggcggcctcggtggaagtagcgcgctgggtttacttccaggctggcggcagaattgcttttcactgcctggcgctgatagcaggaatcgtcgtcatcatgctggtctcgcgcttgttaaaactccgtcagcaacatcttcttcagccagcctgaaggtttaggcctttttgcccgcaacaggagaacactatgttttcatacattatgctgggaacgaacgatctgccacgcgccatcaagttctatgacccgttaatggcgctgctgggacacgtcaaagccggccgtaacgaacagggggcgtcctggggcaccttcaacggcaatcacacctgcgggctgtgcgtgggtgttccttttgaccagcagcctgccggggtgggtaatggaacgatggtggcgcttaacgcccgctccgtcgcacatattgcggaactgcatgccctcgccctgcaactcggcggacgtgacgaaggcggtcccggtcaccggccgcagtatggcgacggttttcacagcgcctacgtccgcgatcccgacggcaataagctggcgtttgtttactatgcgtcggcagattgaatggctgcagcggaggtggcttatgcagacggagataagggagtcaggacggccaacttcgccgtccttattcaccgaggaataaaaagccagcagctcaagcgctgcggcttatcttcccggcaagttatctaccgcaaagtgataacgtaatccggcgtcgcgcatacagcgtttccgccgccagctgaaaatcatattccatcgccttcagctttttcgtcttgagctgttttagtggaataccctcgatatgccctgtcgcgaccaaccaccggatttcagccgtactcagcttgagctgttttttcagtattgatagcaggctgatgcgaaatggctgactgactctgacgcgcaccgttatccgctgacatgccatcaacgtaaccgaccattgctcgtgaatacgaaaatcaggttgccccgacggctcggcgcggttgcgcttcagcgtcgcgaggtcagcggcataatagtgaaccatagctgcatcgttctgcagcaggcgctgaagcagttcacgatttatcttgctgacgtgcagcctggaaaacagggcgatattccaggtgtaatcgcagcgcgtgcatttatagatgctccagatatccagcagcttcttttgcgaattcacccggatggcgccggaaggcgcaaagtcgcgttttacattgcaggcggggcagcgtttggcaatgtgctgataccccacgggcgtgaccgtccatgtaactgtcataacgtaccttttttaacccatacgaaaccgagtccgtgattaacggaccatgatttttggcgtatgaaaaatagttaatcgctatttttcagtgggttaaaaaaagatttccaacgttattttcctggagaagtcctaatcgacaccctgagattaacaaaggggttatcgcgggatatatgagcccagtcaatgtttgcgcggatgattaaaagcttcgtcaatacacccggaatgctcagcgggctggcatcgcgccagcccgcccggtttacagcaccttgctgaggaacgcggcggtgcgtgggttggtcggcgcgctaaagatctgccccggcttgccctcttcctgaatcacgccctggtcgatgaagatcacccggtcggccacttcgcgggcaaagcccatctcgtgggttacgatcaccatggtcatcccctcgctggcgaggtttttcatcacctccagcacgtcgcccaccagctccggatccagcgccgacgtgggctcatcgaacagcataatcgacggcttcatcgccagcgcgcgggcgatggcaacccgctgctgctggccgccggacaggctcgagggccaggcgtcgcgcttatcgcttaagcctaccttcgccagcaaggcctccgccaggtcgaccgcctgctggcgcggcatattgcgcagattcatcggcgccatgatcaggttttccagcaccgtcatgtgcgggaacaggttaaagcgctggaacaccatgccgacgctttcgcgcatcttgttgaggtcggtggtccggtcgtgggcggcaaagccgttaaccaccacctcgccttcgctgaccgtctccagggcgttcatgcagcgcaggaaggtgcttttccccgagccagacgggccgatgatgcacaccacttcctgcggtttaatatcgcagctgatgccgcgcagcacgtggctgtcgccgaagcgcttatgtaagttattaatgtgaatcacttttgccaaacctcttttccagacggttaaccagctgcgccagcaggaaggtgatcacccagtagaccagagagatggtcaggtagggttcccagtaggtggcgtaggcgccggagacggtgcgcgcggcataggccagatcggccaggccaatcgccgaggccagcgacgagtctttgacaatggcgatggcgttattgcccagcggcggcagaatacggcgaaacgcctgcggcaggatcaccttgcgcatggttttccaccacggcatgcccagcgcgcgggaggcctccatctgccctttgtcgatcgactggatgccggcgcggaaaatctccgacacataggccccggcgttaagggtgatcgccacgatgcaggagaggaacgccccgtagctggcgcgcagctcgcgggcaaagtcggcgctcatcaggccgctggtcaccagcaggccgtcgcgcgggttgataaacagcggcaccagcgcaaagtgcaccaccataatctgcacgaacagcggcgtgccgcggaaggcgctgacgtaaaagcgcaccggaaactgcaccaggtagcggagaatatatttccacggcccgtgctcggccttcgccatccgcccgagaccgagagttaacccccagagcgtcccgaggatcacgcagataatggtacatttaatcgtcatcagggcgccgtccacaaacagcgggccgtactcctcgatgatctcccaacggaatcccgtcatagtccttccctaaaaaatacggctatcgcctgggcgatagccgtggtcactgaaaaaggtggattattgcgctggcagcgtcggcacgttgtcgtcgaaccaggttttatagattttggcgtaagtcccgtcagcaacgatcttttgcagcccggcgttgattttgcccagcagttcgctgttgcctttcgccaccgcaataccgaaatactgacgctcaaatttggcatccggcaccagcttgaactgcttctccgggtgctgtttgatgtagtacttcaccaccccgacgtcgccaaccgcggcgctgacgccgtcctcaaacagctcctggagcatcagcggggtattgtcgaagcgcttgatcgcggtgctgtttttacccagcacctcagaaaccacgatatcgccggtgctggagttcaccaccccgaccttctcgtttttcagggccgccagcgaatccacctgcgagtcctgagcgacgacgatagactgttcggccgggaagtacggcgcggagaaatcgaccatctgtttgcgtttatcggtgatagtgatcccggagatgatgatgtcgcggtcgccggtgttcagcgtggcgaagatgccttcccatggggtattgaccagcttaacgtcaaagccttcggctttggcgatggctttgatgatgtcgatgtcgaaaccttccagctgtttctggctgttttcaaattcaaacggccggtaggtgccgccggagccgacggtataggtttccgcagccgcctgtccgacagccgtcagcgcggctatcatgcaacacgctttgagcaaattcttgaccatgagatttcctttttatgcatttattttgcataaaaatacacacactcacttttatatgcaaccggaaaccttcccgctggtgaattatcttctcaatggccccgtttaccgccggatttaccgatagcccgatgcagatcgttgattcgtttcagggatttcaccgttttttgtggcgtggtagaggccaccgacaggacaatcatctcgagacagaccagcaccgtaccgtgcagcggcatccggctactgtccccgccgcgcgggacgtcgatcaccacctgcgcctcctggctgaagcgcgagtccaccgcctgggtcagcaggatggtcggaatacccagccgcttcgcctcgcgcagggtggtcaacccttcgcgatggggggatttttgccccatcatgatcagcacatcgccgcgctgcaggccgataagctgttcggcaaggctaaagcccgtgcggttcatcacgtacgccggcaggccaatacggctgaacaaccgggcggtgtattcggcgaggatccccgaggcgccgataccgaagatccccacctggcgcgcgtcgctgagcaatgccaccgcctgagccaccgccgcgcggttgtcggcccgcgacagaacctcgcacacccgctgatggccttcaagcacaaaatcaatactggagttgacgtcgctggagagcgcggtaaccgtcgagcgcatcttttccgccgaggtgaccgaggtgccgaaccagcgctccatggtctgcttaagctcgcgcagcccggcgaagcccagcgcctggatggcacgcaccaccgtggcgtcggaggtctgggtcgcggtggcgatctccatcgcggtatgctccagcaccacctcgcggttgtcgttgatatagctgaccaccgcccgcagccggggggagagctggtgcgcccgggcgcgatagcgttcgccgaacagatcgactttgcccttctctttttttaccgcgcttttcatttggcctccgccgggatcggcctgccggcaatatgcgactgcacctgggccaccatcagggacagcgcggcgtaggagttagagatcacctcttcccgcggcagtaaaatatagtgcccggtgcggcaggcgcgcataaagtcgcaccagccgggcatcacgccttccatcgcctgcagctcatcctgcggcttaccgccggtatccgaccgccaggtggcgaagacaaaatcagcgtccagctccggcagctgttccgcgctgacgtcaatgcgctggccgtcggggatccgctcaatcagcggcggaaagcggaacccggcgtcgcgcagcacccggcccagcgcatgatacgaatgatgcaccgtgaccttgccgttgttcgcctggatcactgagacgctgtactgcggtgggttgaccatcgctttcagctgtttaatttgttcctgatagcggcgctcgaggatcgccagccgcggctgggtgccggtcagctgcgccagcttgcggtaaatctccggggcgctgccctgcagatgatcgatgctcaccgtcggggcaatcttctccagttgctccactgacacgtggcggctgggctcggtgataatcagatccggctttgcggcggctaccgcttccagatcgatatcggcggtgccaataaagcggatatcgctgttgtcgaaatcgacaccggtgagctgggcgctggcgcgcagatagtggctgccgtccgggcgcgtccggccgtggctggcgatcggcggcgccccgagctcaatcagcggaatggtaatatcgagatcgtgcatcgaaacaatgcgctgcggatgcagcgggacggtgacggtgcggcctaaatcatcggtgaaagtttgagtctgtggggcggcggcgctgacgacccccgtcagcaacagcagcaatgagacgaaccaacgcatactaccttcctggttaaagggcatcacggcgacgccagagcaagacaacgaagaacgggcagcccaccagggcaatgacaatccccgccgggatctgcagcggggcaaacgccagccggccaagggtatcggtcgccagcaccagcaaggcgccaatcagcgcgctgccgcacagcagcgatacctggccgccgcgcagcacgaaacgcgccatatgcggcgccatcaggcccacaaaacccaggctgccgacgcaggagacgctggccgaggtcagcagcaccggggcgaaaaagcgcagcaccgtcagctgctgcagacgtacgccgaggccgatggcggtccggtcgcccagcagcgccacgtccgccgcccgggcggtacagaacaggatgatggccccgggcagcgcccagcaaaaagccaccgccagcagcggccaggtggcggcctgcaggctgcccgccagccagatcatcgccgtctgcacgtcgcgtacgtcggcggtggtcataaagatgccgaccgcggccgccaggctccaggagacgccgatgccaattaaaataaagcgcggccgcgaacagtcgcgggccagcgtcaggaccagcagggccaccgctatgccgccgaccatccccgccagcggccgccagaccaggcctaccgccgggaaaaacagcaccagcgccagaaccacgatgcttaccccctctttgacgccgatcagccccgggtcggccagcccgttacgggtgatgctctgcatcgccgcgccggccagccccagcatggccccgcacagcagcgccatcaggatccgcggcaggcggatatcaaacagaataaagcgcggctgctcgcccatctcctgcggcgccagcagagcccgcgccagcgtcgacgcgggcagcggatagctgccgcggctaaggctgtacagccccagcgccagcagcgtcagcactatgctggcggcaatttttaacgccgcaggacgcagcagcagatgacgggaggcgaaagccagcggccgaaaaccggcccggtgaacggcgcgcgtcatttaaaaaacctcgcggcgataaagataaacaacggcgcacccaccagggcggtcatcgccccggtcgccagctcctgcggcgcgaccagcgtccgggcggcgatatccgccagcaccagcgccagcgctcccaccggcgcagccaggggcagcgccaggcggatatcttccgtcaccagacggcgcaccacgtgcggcaccaccagcccgacaaagccgatcggcccggccaccgccaccgccgcgccgcagagcagcgcaatcgccagcagacccagcagccgcgtctggacgagattaacgccaaggcccagcgccaccttatcccccagcgccagcacattaagccgtggggcaatgagcagcgcgacgccaaggccgatcagcgccggaaccagcgccgtctgcagcgtgctccagttcagtccggccaggtcgccggccagccaggtacgcatcgccagcagcgtctgttcatcgagaatcaatatcgccgccgtcaccgccgacgcaagccctgacagcgccactccgcacaacgtgatgcgcagcggcgtcgccccgccgcgcccggcagaggccagcgccatcacgccaccgaacagcagccccgctccgcaggcggcggtcagcgggcgcccggcggggaaagcgccgagagacaggcccagcgccgaggtcgccaccaccgccagcgaggcgccggcgttaagcccgagaatatgcggctcgccaagcgggttacggatcaccgtctgcagcagcagcccggcgacgccgagcgccgcgccggtcagcagcgccgccgccagccgcaccagacgcagatcgatgataatccgctgctcaaagttgcgcggatcgtactccagcagcgcctgcagtaccgtctgcggggcgatccagcgggcgcctaagccaagatgcaccaacgaggcggcgataagcagcagcgttagcagaagcagcgccagccgggggcgggggcgacgccgcgcggaaagcaggatggccacgctcattgtgccgctgcctggcgggcgcgaaacggcataaagaagggtttgccggtttgcgggttaatcgacatctgcacgtcaacgtcaaacacgcgtttaatcagctcagggctacagacatcgttgtcgctaatcgtgccggcgatgcgcccctgtttaaggaataccagcagatcggcgtagttcaccgcaaagttaaggtcatggagcaccgtcaccaccgtgcggccatgttcgcgggtgagggtctggagcagctcgaggatatcgacctgatagcgcagatcgagccaggtggtcggctcatcgagcagaatggtggccgtttgctgggccagcgccatggcgatccagcagcgctgacgctggccgccggagaggctgtccaccggcagatgggcgaattcggcggtaccggttaagcgcagcgcctcctctaccgccagctcatcggcctcggaccactggcgcatcagcccctgccacgggtagcgcccgcgcgagaccagctcgaaaacggtcaatccttccggggtcaacggcgattgcgggaggatgcccagctggcgcgagacggctttcgtcggcatctggtgaatggcttgcccgtccagacgcacacagccgccgagcggtttcagcattctggcgatggtcgagagcagcgtggatttgccggatccgttcgccccggccagcaccgtcattttgccggtgggaatggtcaggttgatatcgtcaacgatcagggtctggccgtagccggccgacagggcatccagtacgatcccctgctctgcaggtttcacccgctgtggcataactcgctcctgcgccgcagcgttccaggcgatagctggacattctgcagtcaaatcaaaataaatctcattctcttttgatcatgacggggatgaatgtagtagtcaatactcgccatcgtcttcagacggggacgctgactacagcgagactgtgccaacgcaatataattaaaataaaataatatcagatagataacgacagaacattccctactggaggtgtttaaaacgtcctgttcctcgccgctgaatttttatcttgcataacgtttactactacatcccttcatgattgaatgattctcaattacacatctgaaggcgcattcagacgctaaacagagtgcttttattattcagggcaatgattttattggcttagtctgaccgcaaaggcagattcgttcacgagaaacagataatgactcaaccccatgtcgcctgcaggacgttgccagggcgcgcgcttttttcgcttctttttttagcctcaccgggattaatggccgccgacaatcgcgcggcgaaaagtactaacgacgcggaagagactatcaccgtagtggccgacggcgcgcagcaaagcgccaccagcggctatcagccgctcagctccgccaccgcgacgctaacctcgatgccgctgctggatattccccaggtggtcaataccgtgagcgatcgggttctcgaagatcagcacgccacctcactcgatgaggcgctgtataacgtcgctaacgtggtgcagaccaacaccctcggcggtacccaggacgcctttacccgccgcggcttcggcgccaaccgcgacggctcgatcatgaccaacggcctgcgcaccgtgctgccgcgcagctttaacgccgccaccgaacgggtggaagtcctgaaggggcccgcctcgacgctgtacggtatcctcgaccccggcgggctgatcaacgtcatcactaaacggccggagcggcagttctccggttcggtttccgggacctccaccagctttggcggcggcaccggcagcgtcgacatcaccggccccatcgaaggcacaaatctggcgtaccgactgatcggcgaatatcagaatgaggattactggcgcaatttcggtaaaaacaaaagcagctttatcgccccttccctgacctggtttggcgagcgggcaacggtgaccgcgtcctattcgcaccgcgactacagcgccccctttgatcgcggcactatcttcgatctgaataccggccatgcggttaacgtcgatcgcaaaacccgcttcgatgaagcgtttaatattaccgatggctattccgatctcgctcagctcaacgccgagtatcgccttaacgacgcctggaccgcgcgcttcgactacagctacagccaggatcattacaacgataaccaggcgcgggtgatggcctatgattcggcgaccggcaacctcacccgccgggtcgatggtacccacggttcaacgcagaagatgcactccacccgcgccgacctgcagggcaacgtggtagtgggcggcttttataacgagctgctgaccggcgtcgcctatgagaattacgatctgctgcgcaccgatatgctgcgctgtaagaacgttaaaggctttaacatctatcatccggtctacggcactctcgacacctgtaataccgtctccgcctccgacagcgaccagcggatccagcaggagagctatgccgcatacgtgcaggacgcgctgtacctgaccgacaactggatcgccgtcgccggcgtgcgctaccagtactacacccagtacgccggtaaaggccgaccgtttaatgtcaataccgacagccgcgatgagaaatggacgccgaaagccggcctggtctacaagatcacgccgaacgtctccctgttcgccaacgtcgcccagtcgtttatgccgcagtcgtcgatcgccagctatatcggcgagctgccgccggaagagtccacctcttacgaagtgggcgccaaattcgacctgttaaacggcattaccgccaatatcgcgttgtttgatattcataagcgtaacgtgctgtacaccgagagcattggcgatgagacggtggccaaaacggcgggcaaagtgcgttcccagggcgtggaagtggatctggccgggtccatcaccgataacctcagcgtgatcgccagctacggctacaccgacgccaaagtgctggaagatccggattacgccgggaaaccgctgccaaacgtaccgaaacataccggttcgctgttcctgacctatgacattcataacgtctataacagcaataccctgaccgtcggcggcggcggccatgcggtcagcaagcgctccggcaccaacggcgcggattattatctgcagggctatgcggtggcggatgtgtttgccgcctataagatgaagctgcagtatccggtgacgctgcaggtgaatgtgaagaacctgtttgataagacctattacacttcctcgatcggcaccaataacctcggcaaccagattggcgacccgcgcgaagtgcagttcacggtgaagatggatttttaagccggaccatggcgtcgcgccggatattcattgccgggcggcgctgcgcttgcgccggcctacctttccgtgacatttgtcgcagcgccaccggggaatgcgttcagcttaccagtccgcctcctggccgaggatgcgcaatatatcctgacgatgctgcagcagctgcgggttatcgcgatgacggggaaaagccagcggcagcgcaaactcggcgataatccgccctggacgcggcgacatcaccagcacccgctcgcacagcagcagcgcctcttcgatatcgtgggtcaccagcaggctggtatacccctgctgctgccagagggcgatcagctcccgctgcatactgatgcgggtcagcgaatcgagtttgcccaacggctcgtcgagcagcagcagacgcggttcgttcaacaaggcgcgcgccagcgccgcacgctgcgccatccccccggacagctgccgcggccacgcctcgctgaaggcctgcagcccgatgcggtcaatcagcgcgtctgccttcgcctccagcccctttttgccctgcgcctgcgggcccagcagcacgttctgccgcaccgtcagccacggatagagcgtcggatcctgaaacaccagaattcgctccggccccggggcgccgagcgccgcgccgtcgatctgcatctgtccgctctgcggcgcttccagccccgccagcagccgcagcagggttgatttaccgcagccggaagggcccagcagcgccacgctttcccccgggcgcagctgcaggctgatattctccagcaccggtaccgtctgtttgccaagcgtaaacgcatgatgaagatggctgatggataccgccgcgccgcgcgctatcgtctcggttaccattgcatccctcctcgctgccagctcagcagccggtcacgcagcataaataatccgcttatcaggccggagcataacaaggccatcaccagcagcgcggcatacatattaggataggccgcccagccctgggcccactggaggtaaaagccgatccccgacttcaccccgaccatttcggcgacaatcagcaccgaaaacgacgcgccgagccccataaacaggccgacaaagacgttcggcaacgcggcggggatcgccacccgcaggatcaggaaacgctggctggcgccgagggtccgcgccacgtcgtaccacgccttatcaatgcccatcactccggaccaggtcagcaccgtgaccgggaaccaggtgctcagcgcgatcaaaaacacgctggcgccgaagctcgagggaaaaataaacaggcacagcggcagcagcgcggtggacggcaccggccccagcagacgtaacaccggatgcacccagtagccaatccgttgcgaccagccgatggccagaccggtgatgaacccgctgctggtacccagcagcacaccgagccccagcagccccagggagtgcagcaggctgtcgagcaggcgcggccagtcgtcgtgcagcacctcgatcagcgcctgcggcggcgcgaagaatggtaccggcaacacggcagttttggcggtcagcccttcccagacagcaaacagcaccggcagcagcgccagccacttgccggcatgcagcacacgcgcgccgcgcgcccgccagtagcgatagctcagcgccagcagcagcaagccgccgccgagggtgaattgcgccagcgcccagccttcgctaaacggccagcgccgcccggcgtcgggccaggccagggtaaacagaccgcccagcagccacagcgcggcggccagcagcccttctccccacagcggcgcgcggccggtggggcgcgccagagcctgctcaggcgaatacgttggcatagatactctccgcgaactgatggggatcggtacccggtttgatcacctgcacccgctgcaggtcgaccgcatactgcgtcagctctttcacgaacgcttcgcccaccgcgtgatggccgtggccctgcccgtgcaggatgccgctcacctccgcttcactggtattcagggcatgggcgaggaaggattgcgccacactttccggatgcgcagcggcatagctgtgcgcctcaaggatcgcctgggtgagcgccgcggcggccggtttatggtcccgcgccaggctcccgctcacccccagcacgcagcagctgaggttggcataatccccggtcatattgctggcgatcagctgatacttgccggtctccagcagacgatagctgaacggctcgctgccgctgatggcggcgatttcgcgcttgtccagcgccacgctgagcagatccgccgggtagactttccactgcacgtcgctgatcgggtcgataccgtggcgcttaagcagaatggcgaagaagtttttatccggtccggccatgtcggtgacgccgatggtttgacccttcaggctctcgaggccgccgaacggcgagtctttagccgtcagcaggttcagacagccgccgtgggtcccggcggtgagcttgacgtcaaagccctgctccagcgccttcagccagcgcagcgccatccccaccccggcgtcggccttaccggtggcgatcgcctccagcagcacatcggtggagttgccgaagttaacaaactcaacgtcgaggttgtatttactgaatatcttctgctgctcggcgacggcgaccggcgcgaggcataccgcgcttttgttgatcgccagcttgatcttgtagggctctggcaggcgcagcgccggatgggcatcgccgccggccatgtccgccatatcatgagcccacagcggcagagagaccccggccagcgccaggccgccgctgagctgtaaaaaacggcggcgggaaaaaggggttctggtcatggcgtcacctcggcggcgggcacgctaaaacggcggtcaaaggtcggcttcacgtccagccgggtgcggatcaggccgttggcgagataaaagtccgccgttgcctgctgctgggccactgtttcctcggccagcggctgccactgcgactggcggttggcaaactgcgcgcgggcgatctccgccgggaagcggatgatctcccccaacgttttgccgtagctgtcgagattggcgtaggcccagcgctcggcgccggccaggcgctggagataatcctgcagcgcggcgcgtttttgcggatcgttaagcgcggaatccgttgccgcgaggaaggtattccccggcagcagccctttgccgctcaccaggatctgcccctcgttggtcttcaccatttgggtggtgtagggctcccaggtcgcccaggcgtccaccgaaccgtttagcaacgccactttggcgtccaccgggccgaggaacacccactgcacctccttcggtgaaatccccgcctgctccagcgctttcagcgccacgaaatgaccaatcgaccctttaccggtggcgatgcgtttgccttttaaatcagcgccgctttttaacgtgctgccgggggataccagcaccgcggtccccgccgggttgcttttatccacggcaatagctttgaccggcgcaccgttggccagggcgaagagcaacggcgcatcgccgatgatccccgcgtccacggcgcccgcgttgagggcttccgccagcggcgcggcggccgggaactcggcccacttaatgtcgtaagggagattttgcagggcgttggccgcctccagctgcgaacgcatgccgcctttttgatcggcgatacgcagggtaagccgctcctgcgctgtcgcgtagccgcccagcgccagcagcatcagcgcggccgccacccggcctgaaaatgatagacgcatcgtgattatccttgtgattgaaagacgaagttgccggctgccagccaggcgctatcgctctgtggggtatgtacccgtccgcagagcacattgcggtagtggcgttccagcgggttttgtcggctgagaccatgattgccggtcagctcgagcgcgatattcaccgcctgaatggcgttgtcggtgatggtgactttcgccagattggcctcgatggcggaaaagcgcagcgcggcggcctgctccagcaggctgcggttgaccagcagcagcccggcgatctgcccgactttctcctgcacccgtggcagacgagagagcggatggccgagaccggcgggcacccgccccgccagccacctcaccagccagtcgtgagcggcgtgggcaatgctgtcatagatcgccgccagcagcgccgtctgccggttggcgaacaggcgaaacggttcggcctgggcggcgggtggcgcatcggtcggccagacatccaccgcgtgctctgccgccacccgaacgtggttaaaaataacttcatggctgccggtggcccgcatcccggcgtgatcccagcttttcaccacgctgatgcccgggctgtcgccaggcaccagccaggtacccaccagcggcgggttatcatcgcttctggcccacaccgccaaccagcgcagcccttcaatgccggtggtataaattttatggccgctgatgtcccagccctccgcgcgacgggtcgccacggtgtccggcaggccgccccgcgccggggagcccaactccggctcgacgcgcaggctgttgatgaggccaccgtgttcgacagcatcgtgaaaaacctgctggcgcagcggcgcgtgccaggcgtcattttccgccagccgcaaatggtggagatactgcatgcagacgatcagcgctgtcgccggctctccccaggcgatggcggcgatgacctgctgcagctgggccagactggcgcccgcgccgccgcaggatggcggcacggcgagacttaaccagccccccgcacgcagatagtcgatattacgccagggaaactcgccgctggcgtcaaggctggccgcctgctccgccatctgctggcggagcgccgtcagctgccgggcccagtcgtcgcactcaggatggatcacgatgcgcgctccgccaccgcacgccgggcggctttttcccgggcgatcggcagcagcgcccggccatagtcggccgcgtcgttcagcggatcgaagccgcggatcaggaagttacgcaccccgaggtcgtagtagtcgagcagcgcatccgccacctgctccggggtgcccaccagcgcggtggaattatgtccgccgcccaccagctgggcgatgccggtccacagacgtttgtctaccactctgccctgcgccgcggtggcccgcagccgctgggcgccgatgctgtccggtttggctttgaacccgcctccgcgctgcgccgcctgctcggtggcgacgtgcaggatatgctcggctttctcccaggcttcggcttcgctgtcggcgataatcggccggaacgagacgctgaagccgatatcacgctggtgtttcgccgcttcggcgcgcacccgctggatggtctcgccggtttgcgccagcgactcgccccacagcgcgaagacgtcggcatgtttgccggcgacggcgatggccgcttccgacgagccgccgaagtagatgggaagatgcggcttttgcagcgggcgaatggcggaccaggcctgctcggcctgatagaaatcgttgtgaatatccaccggctgctcgctggtccacacctggcgcacggtgtcgaggaaggcgtcggtgcgggcgtagcgctggtcgtggtcgagataatcgccatcccggcgctgctcggcatcgttgccgccgctgatgatatgcaccgccaagcggccccccagcaggtgctcaagggtggcgaatttgcgcgcggcaagggttggggaaacaaaaccggggcgatgggccagcaggtactgaattttctgcgtcgacagcccggccagggccgtcaccagaaagccgtcgggttgatcggaccagtggccgaccagcagacgatcaaacccggcggcttcatgggtttgcgcaaagcgaacgatatagtcgcggtcaaagatcggccccaccggggcaatcgtttcggaagagaggcggtggccaatcatgccgagaaactgaatgctcatgaacaactccttgcgtcagggtaatggagtggccgcgacagcggcgctggtcattaccctatacagagcgtgttaatgagcaaaatgcatttttatcatatcttaatatgcttaattagcattaaacaaaaatgcatagtgctttcagtcggatacggtcagctgctgaaccactttgctggcaaaaaaggtcagcggcggctgcaggttcgccagatactgggcgtggatcagccacagtgagaccgcaggctgaaaatcgctgaggctgaggaccgcgacctcgtcccgccacgggctgctggccagcgccgccctcggcaccagacccagccccagcccctgcgccaccagcgctatctgcagctgcgagcccgcgctctcgacgttgagcgtcaaccgcaatccctggctctgcagctcgcgaatgagcccggcgcgcaggccacagccgtcggggttaaggatccagccccgttcggcgcactcccgcagggatgacgcgcgcaaattcaaacgccggccgacgatcggcaccacctccaggggacacagcaggcgcccgctgtagccctcggcgaagctttgctgggcgggccccatcgccagcatgccgtccagctcgccgttttccagccggcgctgcagctgtccgctccagccgcaggtgatctgcggcgacagtccgggaaactgctggctcagcgccgacagcgccgccggcagggcaatctcgctgagactctgcggcacgccgagacgcagcgcgccgcgcggctcgccttccggatccaacaggctgtagagttttttcgtctcacgcttaatgctcagacactgctcgtacacccggtgtccggcggcggtcagagtcagcgggcgggtctggcgctctaacagcgtgacgttcagctcctgttccagacgctgcaggcgccgggtgatggccgactgggtgatccccagatattccgcggcctgattgagggaggaaaactgcaccgtggccagcaaagcgtcgatatcgtcaatgcgcataggatccttatgtgaaatttgcatattaatatatgcgtaaattgcatttaaataatattaacgcctctgttagcgttttgaccagtccctctgacaggaaccgcacatgactgcaccacgactggaaaaattacgccatttcattcatgaggtagaccgcctgcaccgcgaacaccaccagaccgccccgctgcttgacgccgtggcgcagcggctggcggcgctggtgcgttacgacgactggctgccggaagagtacaccctgccgcatccgcaccattaccagcagtatctgctgcatgccgactccggggagcgcttctcgattgtcagcttcgtctggggaccggggcaagcgacgccgatccatgaccaccgggtgtggggggccattgggatgctacgcggcgcggaggaaaaccagcgctaccagctggatgccgatggcataccgcgcgcgctgggcgccgccacgcttctggaagcaggccaggtggagaaagtctccgctgacgatggcgatattcatcgcgtcagcaatgcgctggcggatcgcgtctctatcagcattcatgtctacggcggcaatatcggcgcggtgaagcgcgccgtgtataccccggaagggcagcagaaaccgtttatctccggctactctaaccgccatttacccaatatctgggattcctcccgcgaacatcaaggataaccactatgtccacctacgcttatcgccaggccgccgggatccgccaggcgctgctcgaccgtcgtgaactggcgctgatcgacgtccgtgaagaggccgatttcgccaccgctcatccgctgtttgccgtcaatctgccgctcagcaaactggagctggaggtccgccggcggataccgcgcttcaccaccccgctcaccgtctacgacaacggcgagggtctggcggagatcgccgtcgaacggctgcggtcctggggctatcaggatgtggccctgctggccgagggtctcgccggctggcgccgcagcggcggcgaactgtttcaggacgtcaactccgccagtaaagcctttggcgagctggtggaaagcgtgcgtcacacaccgtcgctcagcgcccaggaggttcaggcgctcatcgacagccggcaggaggtggtgatcgtcgacgcccggcgcttcgatgagtaccagaccatgagcatccccggcagcatcagcgtgcccggcggcgagctggccctgcgggtggagagcctgacgccctccccgcagacgccggttatcgtcaactgcgccggacgcacccgcagcatcatcggcacccagtcgctgatcaacgccggcgtgccaaacccggtccatgccctgcgcaatggcactatcggctggacgctggccggccagacgctggcgcaccagcaacagcggcaatacgatcccgccgcccgcgcctccggcgcccgggccgctgcggtggcgcattttgccgaacgggccggggtggcggtcatcgatgaggccacgctgcaacgctggctgcagcagagcgaccgcaccaccttcctgtttgatgtccgcagccccgaagagtacgcggcgggtcactatcccggcagcctgagcgcgccaggcggccagctggtgcaggagaccgaccacttcgccagcgtacgaggggcgcgcattgtgctgctggatgacgatggcatccgggcggcgataaccggctcgtggctggcgcagatgggctgggagacggcgcggctgagcgcgctgtcgaccagccagttgagcgaacgcggggtgccagccgccgaggtgccgcccggcccgcaggcggaggagataagcccggcgcagctggcgcaacagctggaagaacccggtacggtggtgctcgattttaccaccagcgccaactttgtcgctcgccatatccccggcgcgtggtggctaacgcgctcgcagctgcgccaggccctggacgtgatccctcccgcccaacgttacgtggtgacctgcggcagcagtctgctggcccgctacgcggtgccggaggtggcggccttgaccggtaaaccggtgcagttgcttaccggcgggacgctggcgtggatcgccgccggtctgccgctggcgcatggcgacagcggcctcgccgtcgagcgccgtgaccgctatcgtcgtccgtacgaaggaaccgataattccgccgaggccatgcaggcctatctggagtgggagtatggcctggtggatcagctggcccgcgacggcacccacggttttcgggtgctctagcgcgagcccgcctcaggcttcgcgcatgatccacgaatactgaaagctcttcggcgccggaaaatgggtccggcgccggtaggagcccagcgactgcggggtgcagtaggtacaactccccagccattcaacgctcgccggcgccacccccgcctctgcgaagatcgcttcggcaaaggcgcgcagatcaaaccacagattatcgctgccacgcgcggcggctttgagcggatcgctgaccgggcccgaacgggagtggaacagccgctggcgatggcgggccacccggtcaccgccgggctggtccagcagttgctgatagaatccggcggagacttcgtaacagcaggggtgaatatacggccccacggcgatgaccagatcggccaatgccaccccctgctggcgaaaacaggccagactgttgtcgacaataccgctgaccagcccctgccagccggcatgcacgctgcagacgtagcgaccgtcgcgcgaggcgatcagcagcggcagacagtcggcggtcaccacccccaccttttgcccggctaccgcggtaaacaccgcgtcggcgtgcgggcgcgtcggcagcggctgctgataatgatgaacctcattaccatgcaccagcttcaccggagccagctcggcataggtaaaggcggcggtttcatggacatcgagaaaagcgtggcggatgccagggatcgcattgagcaaacgggaggtgtaagccatagggacgataagcgtcagggaatgatgtcttaccttaggccaggggacgcggacaggcaaggcggcggcccggcatttttttaccagaccgccggatgcatatcagaccatggccgcgcgctgctggcgatgcatcagccagaacaccgccacgccggccagcacaatgcccggcgctgaggccgccatcaccccgacggtgccggtgccgagggccagcatcttgccggccagcagcgggccgctcatcgccccaagacgccccaccgccacggcggtgcccaccccggtggcgcggatggccgcgggataaaaaagcggcgccagagcgtaaagcacactttgtccgccggtggcgaacagcccggcgacaaaccccgccagcagcatgccagtcagcgacgacgcgctgcccagcgccagcagcgacgccagaatgccgctgtagatcaggagcgacatccgcagcggggtgagcttatccattagcgcccccagcagcagcgtgccgcaggcggcgccgatctgcagagagaacatcacccccgccgcctggctggcgcggaatccctggcccaccagcagcatcggcaaccagttgatcagcatatagaccaccagcagggtgaaaaaataacccagccacagcagcagcgtagcggcggcctggcccggggcaaacagggtgcgcagcggcacgctggcctccgcgcgctgaaacgcctgcgactccggcagccagcgcatcagcaacgggatcagcagcagcgggaccacgccgccaatccagaaaataatctgccaggccgcggcgagaccggaaaagcccagcgctgccgccagcgcggcgccaatgggtacgccgcagtacatcaggcttaccgcccggccgcggaaacgtgagccagcggcttccgaggttaaggcaatcaggttcggcaatgccgccccgagcccgacgccggtgagcaggcgcgccagcagcagcgtcgggaagctccatgccagcgcggtggccagcgagaacaggccaaacagcagcaccgaccccaacagaatgcgcttacgcccgtggcggtccgccagcatgccgcccaccagcgcgccgggcagcaggccgaggatcccggcgctgaagatccagcccatctgcattttatccagcgcaaaggcctgcgccatgccgacggcggcgatccccgccgcctgcagatccagcccttccatcagggccaccataaaacagagcccgatggtgaccaccaggcgcgagggggttgcagtcgttatcttggtcatagggtaccttggcgatagccgaacaaacggagcaggtgactggcggctgatgctttgtcagcagcacgttcttagttatttattgcggttaagcagatccagcgcgacgtcgacgatcatatcctcctggccgccgaccatccgccgcttgcccagctcgacgagaatatccaccgcgctgaggccatagcgcttggccgccgcttcgctgtggcgcaggaagctggagtagactccggcgtagcccagcgccagcgtttcgcggtcgacacgcaccgggcgatcctgcagcggccgcaccagctcatcggccgcgttcatcagggcgtagagatcggtgccatgctgccagccgagcttgtcggcggcggcaataaacacctccagcggcgcattgcccgcccccgcccccatcccggccaggctggcgtcaatgcgatcgcacccctcttccaccgcgacgatcgagttcgccaccccgaggctcagattatgatgggcatgcatcccggtggcggtctccggcttcagcaccgccttcagggcgcggaagcggtcgcgaatgtcgttcatgttcatcgccccgccggaatccaccacatagatacaggtcgcgccataagattccatcttcaacgcctgctgcgccagcgcctgcggggagatcatatggctcatcatcagaaaaccgacggtgtccattcccagctcgcgggcaaaggcaatatgctgcgcggcgacgtccgcttcgctgcagtgggtggcgacccgcaccacccgcgccccggcctgatacgccgctttcagatcgtgcagcgtgccgatgcccggcagcagtaaggtggcgattttcgcctggctgaccgccgccgccgccgcttcaatccaggcgatgtcgctgtgggcgccaaagccatagttgaagctggatccctgcaggccatcgccatgggccacttcgatggagtcgaccccagccttatccagcgcgccggcgatctgctgcacctgcgccagggaatactggtgacgaatagcgtgcataccatcgcgcagcgtcacgtccgagatataaagttttttaccgttcatgctgtcgctcccgccgcgctgtgcattgccccggccatttgctccgccgtcgccagcgccgccgaggtcataatatcgaggttgcccgcgtacgctggcagatagtgcgccgccccttccacttcgaggtaaaccgcggttttcaggccggaaaaacagccgacgccgggcaggttgaccggcctgtcctcggggataacctcaaactgcacctgctgcttcagccggtagcccgggacgtaagcctgcactgccgccgccatttcggcgatcgaggcggcaatcgcctcctgcgacgccagctcgctcaggatgtagacggtatcgcgcatcatcagcggcggctccgcagggttcagtacaataatcgctttgcccttgcccgccccaccgactttttcaatcgcctgcgaggtggtttcggtgaattcgtcaatattggcccgcgtgcccggcccggcggattggctggcgatcgaggccacaatctccgcgtaatgcaccttcgccactcgcgagaccgcggcgaccatcgggatggtcgcctgcccgccgcaggtcaccatattgacgttgccctgatggagattgtccgcgaggttgaccaccggtacgcagtacgggccaatcgccgccggcgtcaggtcgataacgcggatccccggcttcgcttcgcgcagcgcggcatcgtttttgatgtgcgccccggcgctggtggcgtcaaaaacaaaatcgatgtcggcaaattccgccatctgcatcaggccgcccaccccttcgtgagtggtcgcaacgcccaggcgccgggcgcgggccaggccatccgactgcgggtcgatgccgaccatcaccgccatctccagatgctggccgtggcgcaggattttaatcattaaatcggtgccgatattcccggagccgataatggcgactttacgtttacgcatcacgatctccttctccggcggcaacgaagcgtgccgcgactgagccaataccttcgatatgggcgacaaagctgtccccctcgttaatcgtcaccatcgggcctaacgccccggtcagcacgatatcccccgcccgcagcggttcgccgagactcgccagcttgcgcgccagccagactgcggcgttcagcggatgccccagacactcgctgccgcggccgctggagaccagctcctggttgcgggtcatgtgcatggcgcactgcttcagatccagtcccgccggacgctgcgccgggccgccaatgacgtacaggccgcaggaggcgttatcggcgacggtgtcgacaaagccgattgaccagtcgcgaatgcggctgcccaccacctccagcgccggcaatacccattcgatggcgttatacagttcatcaaaagtggtatcggcatgcggcagatcctgcttcagcaccagggcgatctcggcctccaccttgggctgcagcacgcggccaaacggcacctcggcgttgtcgccgtagcacatgtcggcaaacagggtgccgaagtccggctgattgacgcccagctgctgctgcactttgggatgggtcaggcccaccttgcggcccaccacccgccggccatgggccacatggtgctggacgttcaggcgctggatggcataggcggcgtcggcattgtcgacgccgagaatatcgcgcagcggggcgatcgcctggccgctctgttccgcgtcgcggagctgccgggccagcgcgtcaagagaaaaagtcatcatttactccttaagcccgtgcgaggaaattgagcaccagctgattaaaactgtcggcatgttcccactgcgcccagtggccgcagtcgcggtaaatatgcagttccgaaccggcgatcccggcgagcaggcgcaacccggcgtccatcggcacgaagcggtcattgcgtccccagacgatcagagttggcgcgctgatttcgcccagccgcgggccaaagtcaggaaactgcttcgggttggcttccaggctcttgacgaagttgtccagatggtcgcggcgcgacagcatattgttgagacgcgcctcgaacagcgcctcggtgaggtcgcgggtgtcgaagacgaagatgctcatcatctttttgaggttttcaatggtcggctcgcggtacagggcgttcagcagcttgatgccctcggtcggcatcggcgtgaacaggctcatgccgccggtccccccgcccatcagcaccagcttagccacccgctccggccagctcagggtgaaggccaccgcgctatggccgcccatcaagttgcccagcagatggactttatcgatccccagctgatcgaccacgcttttcagaatgcgggcgttgaggtccgaacgcgagccgctgttgacgatagcatcgcttttgccccaccccggacagtcgaggagcagcacgcgatagcccgcctcgaccagcgggtcaatattgcggctgaagttggcccagccggtggcccccggcccggagccgtgcagcatgaccacggtctctttcccgtcgccgcagtcattgatatggatacgcagcgtgcggcccccctcgtcgacattgaggaatcggctggtggcggcttcagtttgcggttgatagctcatgttagtctcccggttaatcaaatctcggtggtggcgctcagcgagccgaatccggcgatccactcggggatcggccggtaatagcggccttcactgcgccagcggccaaaagcggatagcgcggcaaaagcggccacccaggtcttaatttcgtgcgtcgatttcccggccatcgccgacagctcgtcattgccgatcgcgtccagttcgctcagccgcccctgctccagcaggctcataaagcggttgtcccagaccgggttgaggggatggagcgagtgcgggtcttcggtaaaccgtcgggcggcgctgatcactcgctgctggcgccgttcgcgttcgtccggcggcagctgctttccgccgccgagcaggcgatcgcgcagatgggcgtcggccttcgccagctccggcaccggcggctggtgcgagagtccgcccgagccgaggatcagcacccgcttattgagggtattgagaaagcggcccatcgcctcgcccagcagccgggtgcgttgaaaacccggcagcggcgcggcgacgccgttaataaacaccggcagcaccggcacgcggtccaggccacccagcagaaactccagcggctgggcgaagccatggtccacctgcatattgtacgacaccgccaggtcgataccgctgttgaggatggcgtgggcgcaggcttccgccagctcggcgggcaccggcaggtcgccggcggcgctggcgaagtcgccaatcgcggtggcgccgatgccgaggcagaacggcggcatcacgtcatagaaaaaaccgttgtagtgatcgggggcgaagagcaccaccagctctggatcgaattcagcgatccgccgccgggcgtcggcaatcacccggttcacttcatcgaggaccgcctgctccgggtccacgaatcccaccagcggagtgtgggagagacagtgcaaataggcatgcatatcaggccaccttctcttcagcgtgggcggtatccccggttgcgagggtcattttttccgccagagcggtcagctgcgcgccgagggtttgcgggatggcgagagcggcgacaaagcggtccggcctgaccacggcgatggcggtgttatgcagtgcaaaccagcttttgaggcggttttgcgtatcgcccacccgcagcgtgccgggggcgttatcctgctcgcggtggatctgcacctccggcaccacctggataaagcgcacgccaatcgcgcgccagcgggcgatctgcccggcgttgagcccccactgcgggttgcagccccagccgataatggcgaaattcgccccgataacctcgtcgagcagcacgctctcgccgctctccagcgtcacctgcggttgaataaacattttgcccaccggcgaggtcttgccggcgccgtcggtcagcagcgccccctcgcggtactgcggcatcggcttaaagcgcatctcgaggaagtagcgtttcaccggcggcaggtaattcagcagccaggagagaccgtcgcgcacggccccctgccagcgcttcggcggcgccagcacgtggccggcggtgaccgacagatcaatcatcgctttcgcgtggtcgcggcgctcctgctggtagctgtcgagcagcgcctctcccgctttaccgttgaccaccagcgccagcttccacgccaggttgaaggcgtcgcgcatgccgctgttgtatccctgcccctgccagaccggcatgatgtgcgccgcatcgccggccagcagcacccggttaatgcgaaagcgctcggcaaggcgggcgttatgcgtatagacccgctggcggatcagctcgacgcggtccgggtccggcagcactttgctcagcagacggcgcatattgtgcggctcgctgagctgagcttcggtttctccgggcatcaccataaattcaaagcggcgcacgccgtggggcagcgcggcggaaacgtagggtcgcaccgggtcgcagcacagataaacgtgcggagtggccagcgggtcgttagcgatatcgatgacgatccactgattcggcgcggtcttaccttcgaaggggatgttcagcgtacgacgaataaagctggcgccgccgtcgcaggccaccagccagtccgcgcgcaccgtctcccgttcgccgtccggtcctttaagatttaaagtgacactgtcaccggtctggctaaaggctcccacttcgcgggagaagaggcagcggacctgcgggaaacgctgcagaccgtgatacatcaccgcatcgacctgcggctgaatgaaggcgttgcgccgcgaccagccaaactcatcggtcatcggctggatatcggcaaagcagcggccttttggggtgagaaaacgcatggcgtgccacggcgtggtatgcggcagcacgtcattcaccagccccaccgcctgcatcgcccgcagggattcatcgtcaatgccgatggcccgcgggtaatcgatcagtgtggcgagcttttccaccaccagcacgctgatgcccatctggccaaggtagttggccatcatcagaccaaccggaccggcgccaacgatggcgacctgagcggtatgctgcacggcgggttgaatatcgggtgtagatgttgtcattctcagcgacctcacgactcggaaactgcccggctgacaggcaatttgttaatcatgtgtaaacgtatttttataatgggctgagtatagggcgggggttttcggctacaatcaaaacatcatcgaatgtgcaccaggtgcacaacactgtttttaaagcattttaatggaggatttatgcgtgacgatgagtccgcagcgtacaaaacggtgcgcggattaagccggggtttattgttattgaaattgttaaataaattcgacggcggcgcgacgccgggcctgctggcggagtttagcggcctgcatcgcaccaccgtgcgccggctgctggagacgctgcaggaggagggttttgtccgccgcagccgctccgatgacagcttccggttgaccattaacgtccgccagctgagcgatggatttcgtgacgaacattggatttctgccctcgccacgccgctgctcggcgagctgctgcgcgaggtgcagtggccaacggacatcaccaccctcgacgtcgacgccatggtggtgcgcgagactacccaccgcttcagccgactgtcgtttcaccgcgcgatggtcggacggcggctgccgctgctgctcaccgcctccggactgacgtggctggcctttgcccccgacgcggaacgcgacgccgtcgtcagcatgctggccgcccgtccggaagctgagtatcagctggcccgcgaaccggaacggctggcggcgatcctcgcccgcacccgccagaacggctatggcgaaaacttccgcggctggcggcaggaggagaaaatcgcctcgatcgccgtgccggtctgcagtcagcagcgggttatcggctgcctgaacctggtctatatcgccagcgcgatgaccattgagcaggcggcgcagaagcatctccctgcgctgcagagggtggcgaggcagatagaagcccgcatggaagaggaagaagtgtggtacgaaatgccctgatcgtgatgaggataaatgcgatcaaccattgcgcccggcttcgttatataatttaatacacaacgaattttcacgccattcgggccacaccatgtcaaaacaccccttactgctgggcctgacgctgctcagcgccagcctgttcaccggccaggccttcgccgaccgcaccgtcaccgaccagctgggtcgccaggtcaccctccccgaccacgtcacccgcgtagtggttctgcagcatcagacgctcaacctgctggtacaactgcatgccgccgaggatatcgtcggcgtcttaagcagctggcagaaacagctcgggccgcagttcgcccgctttatgcccgagatcgggcaactggcgaccccgggcgatctcacccaggtcaatattgaaagcctgctggcgctgcgtccgcaggtggttttcgtcgccaactatgcgccgccggcgatgatcgcgcagatccaacaggccgggatcccggtagtggccatctcgctgcgccaggatgccgccggggaaaaaaataaaatgaaccccaccatggctgacgaagagcaagcctataacgccgggctgatggaggggatccgccttatcggcgaggtggtcgagcgccagcccgaggccgaggcgctgattcactacaccttcgaggcgcgcaagcaagccaatgcgccggtggccgatattccaccgaaccagcgggtgcgggtgtacatggccaaccccgatctgaatacctatggcgctggcaaatacaccgggctgatgatggcgcacgccggggcgctgaacgtggcggccgccagcgtaaaaggcgcccgccaggtgtcgctggagcaggtgctggagtggaacccccaggtgatcttcgtccaggaccgttatccgcaggtggtcaaacagatagagaacgacccgcagtggcagacgatcgatgcggtgaaacatcaccgcgtgtggctgatgccggagtatgccaaagcctggggttacccgatgccggaggccctggcgctgggtgagctgtggatggcgaaaaaactctatcctgcgcgctaccagagcatcgatgtggacagtaaagccagggattattatcagcgtttttaccgcgtggcgtggacgccagatgcccgctaactctcagccctggctggtgcagggaagcctggcgctggcgacgctggggatcgcggtcgcctcgctctgtttcggccagtacccgttaagcctgagcgccgttggccacaccctggtccatctgccgccaggtgaaggggtgatcgggcagatcgtctggtcggttcgcctgccgcgcgtggtgatggccctgctggccgggggcgcgctggggctgtgcggcgccaccttgcagggcgtgttccagaacccgctggtggacccgcacatcatcggggtaaccgccggctccgccttcggcggcacgctggcgatcctgttgggcgtcggcagtctgctgatgatggcctcgacctttttcttcggcctcgtcgcgctggggctgatttacgccctcgccgccctgcaggggcgggacagcacgctggggctgattctgtccgggatcattctcagcggcttcttcgccgcgctggtcagcctgatgcagtacctcgccgacagcgaagagacgttaccgaacatcgttttctggctgctcggcagcttcgcgaccgccagctggcataaggtactgcttatgtccctgcccctggcgatggctgccggggcgctgtggaagctgcgctggcgtatcaacctgctggccctggaggaacgggatgcccgcagtcttggcgttccggtggccgcgctgcgtcgcggcgtgctggtttgctgcgcggtgctggtggcagcccaggtggcggtcagcggcagcatcgcctggatgggtctggtggtcccgcacctcgcccgtctgctggtaggggctgaccatcgtcgcctgctgcccaccgccttctggctcggcgccgcgctgatgctggtggtggacgatctggcgcgcacgctgacccaggcggagatcccgatcgggatcatcaccgccctgctcggggcgccgctgtttaccgtgttgctggtgcaatcccgacgccggagtacgacccgatgaacagctcattatcgctgcaagcgctacgctatggccaccgtcagccgctcttcgccccgctcacgctggcctgccggcccggtgagatctgggcggtgctgggcgccaatggccggggaaaaagcaccctgctggataccctgaccggcgtgttgccgccgctgggcggcgagatgcagtgcgagggcggcgtggccctggttccgcagtcgtttcgtcccgcttttcgctggcgcgtgagcgatgtggtgctgatgggccgggcccgtcacgtggatctctttgcccagccggacgaggaggatgcccggcgggttgagcaggcgctggcgcagctggggattgccgccctggccgaagatgacttcggcgccctctccggcggccagcagcagctggtgttgattgcccgcgcgctggtcagcgccagccagaatatcctgctggatgagccctgctcggcgctggacctcggtaaccagcaggtggtgctgcagctgatcggcgacctcgcccaccgccaggcgcgcaccgtcctgttcaccacccatgatcccaaccacgccctacaggtggccagccatacgctgcttctgctgccggagggccggtggctggcgggcgagaccgccgacgtgctgagcgaaacgcatctccggcaagcgtacggcctgccggtacgcctgatccgccatgccgcctccgccttccctctgctggcgccggggtttacgctgcgtcgctgaacggcataaaacccgcctgccggagatacccctggccaacgtcgccgaggataaagcgatacagggccagcgcggcgggatcggctctgagacgcgccagttggtaatcgcagcgaatattccacggcgccgggatggtcagggtacgcagatcgtcgcaggtggccagcgcggggccatagtgcgcatagccgataaacagatccgccagattctggcgaataagccacgcgccggctatctctcccggcggcacgctcagtgagtctctgccgccgaccagctgctgcgcccgcccggccatcgcgttgcccaaccctggatagcgtgcctcaattcgggcgaacagctgccaggtataatctcccgacggatcgcagcctggcgtggaggtcgccaaccgcaggcggggcgtgctgagcagcgccagccagtccaggccatcgttgtccggcgaccgccgggcggtcagcatcagctggttgctggcaaatccctggcattcctgcgccagacccgcctgcagcagcgcctgcgggtgcgccgcgttggcggaagcaaaaaccgcgcacggtgccccggcttcgatccgctcgcgcagcaggccggcagggccaaactgcgcatcgaccgccaggccagtgtgctgccgaaagtgcgccaccagcggcaggaaagcgcttctcaggcttcccgccgccagcagcgtgagagtggtgtttgccataggatatcgctataaaccggataatatagcgctatattacccggtttgccgtcgcgtcagtagcgaatttctgccagcgcacgcagctgctcgggggtggctaccggtaggtcaaaaaagcgcagataggcagggatcatttcaaacagcatgtcggtcccgcgctggatgtggcactgtcgtgcctgagcggccctcagcagcggggtgtactcctgagtcatgacgacttcccccacccaggcgcctggcgccagacgttcaacgtccagcggcagcggatcgctggccttcatccccagcggggtggcattgaccaccagctcgtgtccggcaggatcgggctgcatcagggtgatattgagctgcggatagtgctgatgcagccgcccggcgagggcgtgcgccacctcgggccgggtatcgtacagggtcagggcgctgacccccgccgccgcgagggaggcggcgatagccgatcccaccccgccgctgccaaccaccagcgcccgcgtcccctgcgggttaaaccctttacgacgcaggcccagcacaaatccctcgccatcgaacatgtctccgctcaggctaccgtcagcctcgcggcggatggcattgcaggcgccagcgatggccgccgtcgggctcaggcgctgcaccagatcgcaggtggcgattttatgcggcatcgtcaccagcgcgccgatgatgttggtcatcgtaaacagcggcggaataaacgcggcgtagtcctccggcctgacccccatcggcaccaccttcacgtccacctgctggtcaacgaaccacgggttgtagatcatcggcgccttaaaactggcggtcggatagccaaggtgcgctatcagccgcgtattcccactaatcaccatgccttgctcctttgcttactgcgataactcgatacgtttgacgtcgccgaggataaacagataggccaccacgcccagcagcgcggcgccgccgatgtagatcaaggcgtagaagaaattaccgaacccggcaacgataaagccgatcaccagcggggtgaggatccccgcgaggttggcgcagaagttaaacaggccgccggtcaggccgcccagccccttcggggcgatatcggagatcagcgtccagccgagacccaccatcccctggccaaaaaaggcaaacgacatcaccaggatcaccgccaggtcgctctccagccagttggcggtaatgatgcagctggccatcagcaggccggcaacgatcggcagcttacgaccgaggttggctgacccggtagctttcagcaacttgtcggagagccagccgccaaacatcaccccgccggcggcggcgacaaacggcaggatggagaagaagccaaccttcagccagggcatatgccgctcggtggccagccaggtggggaaccaggtgagaaagaacaccagcacggtattgccggcaaactggccgatgctggcgccgatgatctgccgtttgctcagcagctggcggaccagcggccagctgaacgccacctgctggtcggtcggggcgctgaggccgccgccgttttcgatatgctcgcgctcctgctggctaaggcgcggatcttcatgcggttcgcggtagcagcgccaccacaccagggcaaacagaatgccgacggcgccaacgctgacgaacagcacccgccagccgaaaccgtccatgatccagaacagcagcggcgcaaagcaggccagcccgagatactcccccacggtgtacaccgccgtggccttcgcccgctcctgctgtgggaaccaggcgctgaccacccggctgttgaccggaaagcacggcgcttcgctaataccgagcccgaagcggcacagcagcagcgtcttcagccccaccgccatgccgtggaacagggtaaacagcgaccacagcgtcagtgacaaaaagtaggtcactttgttgccaaagcggtcgagaaacaatccgccggggatctgcgccagagcataggtccaggcgaaggcggagaagaggattcccatgatcgccgggtcgatccccagctcagcggtgagctttggggcggcgatccccagtacggtgcgatcgagatagttgatcatggtgccaatggccaacagcgcaagaatgccgatacgccgccgggagcggcgcacggtgacggctggctgggcggcagccgtcgggttagggctatatgagctcatagtcggttcctgtctcgggtacagagggtgttgttattgtgtttaacgcataatgaaccatttgattcaggctaacaatactgcatcgccgccagacggacggccgcattcgctgcgccatagagcgcatagccagcccggcgctcggttaactcaaagaaaaagcggccggcggtaaacggccgggtgtaaagatgcaggaaatctcccccctgcggatcgcggtcatagaggagctgctggcgctgaagctgcccgacgtccagctcgccgccaaagcgcgccagcagatcgtcataataattggccgggatcggcagcgtatggcgggcaacctcggcaagctggtcgcaggcggccggcagatcgcggcaggcaaaggcggcatgctgcagccccgccccctggtagcaagcgacggagcgggcgatctgcgtcgtccggctctgcgaaatattcagcgccagacggatatcgccctgcgggctgcgcaccgccaggctgcgcaccagtccatacgggtccggcagcgtctgctcatgctcaagggaaaaaccaaacaccgtacggaagaacatcacccagttatcgcggctgtcggcctccattcccagcgccagatgatcgataccgagataatcctcgcgcaccgtcacgccatcacgcagatgaaaatcgcgctcgtagatagcctccccggcgtcgatgagatagataaggctgccgtcgggggcgcagatcgccgggatcggcgtttcgttcggcccggcgtcgccctgccaggtggcataccccagcgcgcgggcgcgggcgacaagcgacgcgctgtgctcgacccgcagcgccatcgcgcagagcgataccccgtggcgttgataaaaatggtcggcccagctgtgcggctgatggttgatgacgatccgcgccccgccgttgcgccacagcgtcacctgtctggagcggtggcttccctcgtgctgaaaacccagcgcctgcagatgttgccccaggcgctgcgcctcggcggcgctggcggcgaattcgataaactccagcccgtgatagaccggcagcggcggcggtgaaaacagatcggcatcgcacgtcgggagccgacggcgggtttgctcctccagccacagcagcgaacgataaccatctttggccgtcgcgccgttcggcgaggcgcgaaaaccgtcattgaagatctccagcgaccaggggccgcggtagccacagcgggtgatctgctcggcaaacgcctccagcggcagctccccctgtccgggaaagcagcggaagtggcggctccactccagcaaatccattttcatatacggcgcatcggcgagctgtacaaaggtgattttctccaccggcaccgacggtagcgcgtccagcgtgtcgccgcgggccagaatatggaagctgtcgagcaccaggcccaacgccgggctgtccacccgccgcacccgctcccaggcctgctgccagcggttcacatgggttccccaggccagggcctcatagccgatagcgatcccctcctcttccgccagcgtggccagcgcccgcaggtccgcgacctgcaattcgctatccgccgagcagtccggctgtacattgctgcacagcagcagcgtctcgcagcccagctcgcgcatcagagcaaacttgcgccgagcgcgggccatattcgtcgcaaactgcgcccgactggcgccttcaaaatcgcgaaagggttgaaaaagcgtgatttttaaccctaaatcggcggcaagctggcggatttccgccggcgtccccgtataatagagcagatcgttctcgaaaatttccaccccctgataccccgccgccgcaatagcgtgcagcttctcaggcagggtgccggaaatcgaaacggtggcgatagagcgcagcataaggtcctcgggtcaacagctgacgtaagccttgaatatgtatcatttggttcatttgcgccataccaggttgctaaattgtgatcattatgtgtattttttgtcacccaagaaaaaggagttgccatgaccgtcgttgcccatgatgaagcacaatccctgaaggcgcggatcttcagcgccgctatcgctgtctttgctgaacacgggctgtcaggcgcccgcatggagcagatcgccaccgaggcgcagaccaccaaacgcatggtggtttactacttcaaaagcaaagaacagctctatcaggaggtgctgcagcatgtgtatgcgcggatccgcgaaaccgagcagcagctggggctggagaatgtgccgccggtggaggcgctggtgcggctggtgcgctggagcgtgcgctatcacgccacccatgcggactatatgcgcgtcatttgcatggagaatatgcagcgcggcaagtggttaaaaagctcgggtgaactgaagccgctgaatcgtaccgccctgtcgattctggaagacattttactgcgcggccagcagcagggcgtctttcaggcggggctcgacgcgcgcgatgtccaccggttaatcagcagcttcagcttttatcaggtgtcgaacttctacaccttcagcagcctgtatcttgacgatccgctacccgccatcgacgatgaagcgatggtggctcaccattgtgacattgccgtcagggcggtgatccgcttcgtgatttcctgacccgccggcgcaagggatcagtgcccggaaagcgcatgaatgactttctccatggcctccacggtgagcggcgaacgctggattttgcggttcgccagcgaggtgcgcagcacaccggcaatgacaatgtgtttcggctcctgacccaggtcacgcatttccagcacgactttacccaccacgcggcacatttcctggtacaggtcgtcgtctttcgctttatttcccatagaatttggctcgtattttatcattatcaatcaaatcattattgatagatttgccgcacaacgcaaaccatcgccactttaaaggttcaatgacgcattttaccggctcatgatggcgaaataatccatttcttttactctttttcatagccggtgacgaaaaagtgtgttgcgtagatttttgcataacgtgccggttttgttacgcgttttgtccataatttgaaacgaggtttttattttcctttttgatttcggcagcgtataatgcgcttcgattctttcttgaatggtttcagcgcattggactgcatgataaaacgcataacaccttgccacatttcatgggctgaaccgccagcacacattcttctgcacgcttcagggttgtcacctatccttagggcgtggcttagcaactttcgtaatacaggtttggctccccggcagtgcgcccgcggagcgagaattccatatccttcacaacttaaagactaaaactgtcatgaaaaagaccaaaattgtttgcaccatcggtccgaaaaccgaatctgaagagatgctgaccaaaatgctggaagccggcatgaatgtgatgcgtctgaacttctcccacggtgactatgcggaacacggtcagcgcatccagaacctgcgcaatgtgatgagcaaaaccggtaagaaagccgctattctgctggacaccaaagggccggaaattcgtaccatcaagctggaaggcggcaacgacgtctccctgaaagcaggccagaccttcaccttcactaccgataaatccgtcatcggcaacaacgaaatcgttgcggtaacctatgaaggcttcacctctgacctcgccgtcggcaacaccgtcctggtggacgatggcctgatcggcatggaagtcacggctatcgaaggcaacaaagttatctgtaaagtgctgaacaatggcgacctcggcgagaacaaaggcgttaacctgccgggcgtctccatcgccctgccggcgctggctgagaaagacaaacaggatctgatcttcggttgcgaacagggcgtggacttcgtcgcggcctccttcatccgtaaacgttccgacgtcgtcgagatccgtgagcacctgaaagcccacggcggcgaaaacatccagatcatctccaaaatcgaaaaccaggaaggcctgaacaacttcgacgaaatcctcgaagcgtctgacggcatcatggttgcgcgtggcgacatgggcgtggagatcccggttgaagaagttatcttcgcccagaaaatgatcatcgaaaaatgtatccgcgcgcgtaaagtggttatcaccgccacccagatgctggactccatgatcaagaacccgcgtccgacccgcgctgaagccggcgacgtggctaacgccatcctcgacggcaccgatgcggtgatgctgtccggcgaatccgcgaaaggtaaatacccgctggaagcggtcaccatcatggcgaccatttgcgaacgtaccgaccgcgtgatgaccagccgtctggacttcaacaacgacaaccgtaaactgcgcatcaccgaagcggtgtgccgcggcgcggtagaaaccgctgagaaactggaagcgccgctgatcgtggtcgccacccagggcggtaaatccgcacgcgctgtgcgcaaatacttcccggatgccaccatcctggcgctgaccaccaacgaaaccaccgctcgtcagctggtgctgagcaaaggcgtggtaccgcagctggtggaagagattgcctctaccgatgatttctatcatctgggcaaagacctggcgctgaagagcggcctcgcgcgtaaaggcgacgtagtggtgatggtttccggcgcattagtgccgagcggcacgactaataccgcttccgtacacgtgctgtaataatttacaggttaattggttttttttaataaagcgcctcgcggggcgcttttttttattcattgattagctcttcctattaaaaatgcaaatcggaatttactatttaataagggattatctaagatgaatccgatggaagcgcgctgttttcactcgcctttttcagcgattctgagcaattcgatgcttctttgagcgaacgatcaaaaataagtgcgttcaggtaaaaaaaatattctcatcccaaaaaactttgtgtaatacttgtaacgctacatggagattaactcaatctagagggtattaataatgaatcgtactaaactggtactgggcgcggtaatcctgggttctactctgctggctggttgctccagcaatgctaaaatcgatcagctgtcttctgacgttcagactctgaacgctaaagttgaccagctgagcaacgacgtgaacgcaatgcgttccgacgttcaggctgctaaagacgacgcagctcgcgctaaccagcgtctggacaaccaggctcactcttaccgtaagtaagagttctggtaataaaaatggcgcactctgtgcgccattttttttgccctcagcatgagggctattgggtaagcagaccgttgtcagacgaactattctgcgccgacagcgacgtcgccgtgctacctgcccccgccgacaccaccaccggataccccgcccttctcgacatcgcttttttcaactgcaggtcatccactgctttatcctctgcgaaggcgtgaaacgccgctggcagcgtgtaagcgatggtccgggtgttttccccttcggtctgcgaaagcggcctgtggacttcgacatagcgtttaccatccggctcgacggcaaacttcaccggctgattgataatccgtaccggcgtcccggttttcacctggctgaacagcgctttgatgtcatcagcgttcatccgcatacagcccgagctgacgcgcagaccaacgctgtctggggcgttagttccgtggatgagatattcaccgttaccgtaggccagacgcagcgcatagcggcccaggggattgttcggtccggccgggaccaccgctggcagcgtcacccctttctccagcgagcgcgcgcggatgccggcggtaggcgtccaggtagggttagggatcttctgccccacgcgggtggtcatctccggcgtttccagacctaactggccaatgcccagcggatagacctgcacctgattctctcccggcgggaagtaatacagccgcagttcggcgaggttgacgacaatgccctccctcggcacgtcgggcagcagcatctgagaagggataaggacctgagtgccgggcttcggctgcactggtgcaatcgtatcgttggcttcgaggatcagcatcgccgcggtatcgaaatggcgcgcaatcgcctgcaggttgcgatctccctcctggaccgtccagtactgattctgaccaatcagccgactgttggcgggaggaagcgggtaatcaacggcccaggcggccgtggaggcgccaagggcgctgagaagggctaaggtgatcatcgttttgcgtttcatactgagattccttctttcgctgataaaacgccaggagactgaacggcggcagggtcagcgccctgccggacgtaacagaatgaaatctacctgtttattctagctaatatttgccgctttcgcgcgtatcgcgcggatcatggcttcgaggccttgcgagcgggagggggtgagatgctgggtgagcgccattttttcaaaccacggacgcacgtcgaactcggtgatgtcctgagcggtcatccggtcatagaggataaataccaccgctatcagacccttgacgatcgccgcatcgctatcgccgcgcagggcgatcacgcctgtgggatcctggtccatcacgatccagacctggctttgacagccctgaataatgttctgcacgctatgttcttccgggcttagcggcgccagacgctggccaagctcgatgatatagagatacttctcttcccagttggcgcaacggctaaagttacgcaacagtttgtctttgtccggtagtgccgccattgtcccgtcctttaccctaacagtttgcggatccgctggaggccggccaccaggcggtccacctcttccgtggtattgtacatcgccagcgatgcccgacacatagccggtacctgataccgggccatcaacggcatcgcgcagtggtgtccggtccgcacggcgatcccgtagttatcgaggaagctgccgacgtcataggcgtgatgctgaccgaggttgaaagcaattacccctttacgctgcgccgggccgtaaaggatcagatccggtaccgcgcgcagggcatcgagcgcgtagcgcatcagcgtctgctcatactcggcaatctgcgtcagtcccagctggctgacgtaggtcagcgccgcgccgaggccgatgatccccccggtattcggcgtgccggcctcaaagcgccacggcgcctgattccaggtggtgccctccgtcaggctgacggtggcgatcatcgacccgcccccttcccaaggcgccatcgtctgcagcagctcggaccgggcgtagagcacgccgatcccggtcggcccgtacagcttgtgggcggagaaaacataaaaatcgcagcccagcgcctggacgtccaccgggtggtgcatcaccgcctgggcgccatccaccagcactttcgcgccatgctgatgcgcaagagcaatcagcgccgccagcgggttttccgtccccagcacgttggagacctcggttatcgccagcaggcgggtgcgcgggtcaaacagtcccgggacaacatccagttgcagcgtaccgtccgggttcagggggatcacccgcagctcagccccgacgcgggcgcacagcatctgccacggcacaatattggcgtggtgctccatttcgctgatgatgatgttatccccggcgccgacgttggcgtttccccagctgttggccaccaggttgataccctcggtggtgccgcggacgaacaccacttcctccgccgacccggcgttaaggaaggtggccgcctgctgacgcacggcttccatccgcgcggtggcttccgcgctgagggtatggatgccacgatgcaccgccgcgtagccgtggcgatagaattccgcttcggcgccgatcactgcctccggcttctgggcgctggcggcgctgtcgagatagaccagcggctgaccgttgacctcccggttcagtaccggaaaatcggcgcgaacctgttctactgaaaatgtcatacagtgcctcccggcaaacgctgtccaatacgcgccagcacctgctctctgagcgcgtcgctgcggatagcctcggtgagctcggcggcgaaggcgtagaggatcatctgctgcgccgcctgctgttcgataccgcgcgagcgcagatagaacagctgctcttcgtcaatgcgccccaccgtcgccccgtggctgcatttcacgtcatcggcgtaaatttccagctgcggtttggtgtcgacctccgccagccgcccgagcagcagattattgttggtcatctgaccgtcggttttcagcgcgagcggcgcgacgttgatcagcccgttaaacaccgcccgccccttatcgctgacgatggttttgtgcagctggcggctggtgcagtagccgacctgatggtcgagccaggtgcggctatcgcagacctcatttttcaccggcatcgccagcgaattgaggcgcaggttgctgttttcgccgcccaggcgggtgctggtctggtgacgcagcacctggccaccaagcaggaaactgctgctgaaggccgaggcgtcgcggcccagcagcaggtcgttatgggcgaagtgatagctgcgggcattctcaaatgccagcttgatatgctggaggtgcgcgttatcggccaccgtcatggtcaatcgcccgccggtgaaatgcggctgctcattgaggctcaggtaatgctcgacaatcgtcgcctccgccccgctctccagcgccagatgatggcgatagtgggcggtattcagcgcatcgccggccaggccactggtgatatgcatcagcagcagcggtttatccaggcggcggttgcgcggcacgcgaatgcgggtcaccgtctgggccaggctttcggtcagatggagaaacacctccggctgcagggcatccggcagatgctggcgctgattatcgacactgacctccacgccgctggcggcaagatcgtcgctcagctgaggatgatagcggccatcgataaacaccagccgccaggcgtccagcggcagcgccagcgcatcacgctgttcagcactgagagaggctccctcatcggcgacaaagcgaccgttaagtagggcatccagcggagtgtatttccagtcctcgtgcttgcgcgtcggcagcccaaggcgcagcagctgctgcagatgctgactggcctccggggtacgcgggccgccctgcgcttcaaacagatggtgccactgctgcagcgcgttactgctgttcggtaagccagccatagccctgctcctccagctgtttgaccagagagaaatcgcccgacttcacaatccgtccctgatacagcacatggacatagtccggcttgatatagtcaaggatgcgctgatagtgggtgacaatgataaaggcgcgtttgccgtcgcgcagggcattcactccctgcgagacgattttcagggcatcgatatccaaccccgaatccgattcatcgagaatgcacagctccggctcaagcaccgccatttgcagaatatcgttgcgctttttctcaccgccggagaagccaacgttcaccgagcgggtcaggagatcttccggcatctgcagcagcttgatcttttcttccattaagtcctggaaatcgaaacgatccagcgcctcctggccacgatagttgcgcacggcattcagcgcagtctgcaggaaaaactggttgctgacgccggggatctctaccggatactggaaggccataaagataccttccccggcgcgatcttccgcagcgagttcgagcaggtttttgcccttaaattcgacgcgaccgccagtcacctcataatcttcacgcccggccagggtggccgaaagcgtacttttacctgagccgttcggccccataatggcgtggacctctcccgggcgcacctcaaggttcagcccgcgcaggatcgctttatcttcgacggcgacgtgtaaatcttgaatacttaacatcttttttccttaattatcagccgacgctatgctcaaggctaatggccagcaatttttgcgcctctacagcgaactccagcggcagctcggagaagacgtctttacagaaaccgttgacgatcatcgagatggcatcgtcttcgctaatcccgcgctgcaggcagtagaacaattgatcttcgccaatccgcgaggtggtcgcctcgtgctccagctgggcgctattgttgcggcattctacatacgggaaggtatgcgccccgcagtccgggccgatcagcatcgaatcgcactgggtatagttgcgggcgttggtggcggtcggcatgattttgaccagcccgcgatagctgttctggctgtgtccggcggagatccctttcgagatgatggtcgagcgggtgttcttgccgatatggatcattttggtgccggtgtccgcctgctgatggccgctggtcagcgccaccgaaaagaattcgccgatcgagttatcgccgcgcaggatgcagctggggtatttccaggtgatggccgagccggtttccgactgggtccatgacattttgctgttctccccttcgcacagggcgcgcttggtgacgaagttgaggatcccgccggtgttgttatcgccggggaaccagttctgcaccgtggagtatttcacttccgcgtctttatggatgatgacttcaacgaccgcggcatgcagctgatagctgtcgcgcaccggcgccgagcagccttcaatatagctgacgtagctgccttcatcggccaccagaatggtgcgttcaaactgcccggtcttttcggcgttgatgcggaaataggtcgacagctccatcgggcagcggacgcccttcggcacatagataaaggtgccgtccgaagccactgcggcgttcagcgcggcaaagaagttgtcattccccggcactacggtgcccagatactttttcaccagttccggatggtcgtggatcgcctcgccgaaagaacagaagatgatcccctgctcggccagcttttctcggtaggtggtcgccaccgacaccgagtcaaatatcgcgtccaccgccacctcgcgcccttcgcgtaccggcacgcccagctggttaaaggcttcttccacctcgctggtcagaaaggtattggccccggtctgctgcaccgcgccaggctcggaggcgcaggtctcatcgcagttgccgcaggagggcgcggaatagtagctgtaatcctgataattcagcttatcgtaatgcgctttcagccagtgcggctcctccatttccagccacgcccggtaggcattcagacgaaactccaacatccactgcggctcattgcggcgagccgagatagcccgaacgacttcttcattaatgcctttggccagctcatcggtttgcaggcgagtaaaaaagccctctttgtagttgagcgggccgccggtccaggttttgacatcgtcagttgcttcagtattacgcgacatagttactccgcctgcaccccaaaactttcgccgcagccgcactcatgctgcgctttcgggttatgaaatttaaagatttcatttaaaccttcccggacataatccagctcggtgccgtcgatgaacggcatcgcctgcagcggcgcaaacagcttcgccccgtcagattcaaagagcagatcgtcgggcgccggctcggcaatcatttcgagcacatagccaaaaccagcgcagccgctggttttaatgcccagccgcagccctttcttatccggctgcttgcgcatcagatcgcggatatgcgcggcagcggccggcgtcatggtcagtccctgccagctgaaatcggcgggattaaaagttcctgcttgtacttccatcgatagacctccaggttggcgccatcaaggcataccgccatgttagtgataatgattatcacttcaacccttctgcagcaggggtattgcctcatttagtgctttttataagcatagaccctcgcccggggattatcagggcgtgcaaatagaacttaatgcattgatttataatatgttattttgaaatcattctatctccgcacgcaatggcaaagatgtatcgaaaataccgatttatgcaatagcggcagaccaccttgctggttatccgttgcaggcgagcataaagtgacaacgtaacagaaagaccatgccagcgcggggcgcagccccggccatgcgctagaaaaaagcgggtagtgaaagcgcccgccggtaacgcttcaggaaaggaataagcgccgctcgcctggccgcgttcgggaaataaaaccaaaataaaacgggcaaacggggctgccaggcgggataccggctggctaggtgcctttactcaccagccgggcggcctggacaaagacctcatcctctaccccgtcccccttctgtctgcccagcctcaccagttcatccacgatactcccctgattaatctgcttttgtgtagccactaagctaatgaccgccgcgccgatggccatgccaatcaatgccgtttgttcatctttatctttcatggtgtcgctccgtctgccctcctcagaaaggctagcaaaagataccatctgctcaatttcaaattcatcttctttacacctcccggaaaacgcaggcgccgcactgacctctccttccccctggtggcgatggcgcaaagcgctgtcgcctcataccgggtctttattttgccagcttcacgttgcgcggaaataaataaaaataacgcgcgcgccgaagagtaaaaaaaggaaatagcagcctcagcgataaaaccagattattccagcagggaatagctggaatgctaatatttcatttcctcgccggtttttagaggcctatagtttttttacctgcagaacatccactaaggttaaaaaacataaggacataataatgattgtttcagcccccagcgattatcgcgaagccgctcgtcgtcgtctgccccgcttccttttcgattatattgacggtggcgcggtggcggaaaacaccatgaacgccaacgccgccgagcttgcctcggtagctcttcgccagcgcgtactgtgcggggccggcgaaccgacgctggcgaccacgatccttgatgccccatgggcgatgcccgtggcgctggggcccgtcggcgccaccgggatgtacgcccgccgcggcgaagtccaggcggcccgcgccgcctcccgcgccgggatcccgtacaccttatccaccgtgtcggtctgctcgattgaagaggtggcgagccacgccagcggcgcgctctggtcccagctgtacgtgctcaaagatcgcggctatatgcgtaacgcgctggagcgcgcctgggccgctggcatgaaaaccctggtatttaccgtcgatatgccaatccccggctcgcggtatcgcgataaccgctcagggatgtccgggccgcacgccaccctgcgacaatatctccaggcttgcacccatccgcgctgggcgatgaacgtcgggctggcgggcagacccctgtcgtttggtaatatcgaagcctacaccggccacaaaatgaccatggacgactatatggggttcatcagcaacaacttcgacccgtccatcgcctggcacgatctggagtggatccgcgacagctggcaaggaaaattaatcatcaaagggatcctcgatgccgacgatgcgcgcaatgccgtgcggctgggcgccgatggtattgtggtgtcaaatcatggcggcagacagctcgatggcgccatccccaccgcccgggcgctgcccagggtggtggatgcggtcggcgacgatctgacagtgcttgccgattccggggtgcgctccggcgtggacgttatacgtctgctggccctcggcgcgaaaggcgtgctgctcggtcgggcctatatttatgccctggccgcggcgggcgaagcgggcgtggcgcatctgctgcgcttatttgccgaggatatgaaggttaccatgaccctcaccggcgcgacctcgccatcggccatcagcctcgattgccttgatcgcctcgaacaggatcaacaccgcacccatgcggtgccggtatccttacccgcctgaccctgcccgggacctggcctggccatgtgcctcgcccaggtccggcaaagtggaattacctctgaaggtgcaactctgtctgttgtaccgtgttctccggacggatgcggaaccagatcgcgtacatggccggcaggaagataagggtcatgatggttccccccagcgtcccgccaatcagcgtataggcgagcgttccccagaagaccgaatgagtgagcggaatgaacgccaggatcgccgccagcgcggtcagcagaaccgggcgggcgcgctgcaccgtcgcctccaccaccgcgtggaacggatcgagccccgcctgttggttatgatggatttggccaatcaggatcagcgtattgcgcatcaggatccccgacagggcgatcaggcccaccagggcattgatgccaaacggctgattgaacagcagcagcgtcgggaccacgccaatcagccccagcggcgcggtcaggaaaaccatgaccatcgccgacagcgaacgcacctgcaggataatgatcagcagcgtgagggcgatcattatcggaaataacggcaccatcgcccgggtggccttgccggattcctcaatcgaccccgccgtctcgatgcgatagccaggcggcagcgagtcgataatgggctgcagcggcttcatcagcgcggtggagacatcaggcggctgcaggttctccgcaacatctccgcggacggtgatggtcggcgtgcggtcgcgacggcgaagcagcgggtcctccatcctgatcgacacgtcgccaatctgtgacaagggaacccgctgcccgccgctgcccaccagggtgaagtcggcgattttcgccggatccagacggatgtcgcccgccgcgcggccgatcacctgcacggcgcgaatatcttcccggacggtggtgatcgggatccctgacagcaggaactgcagctgctgggcgacggactgggagctgagtccgctcgcctgcagccggtcctgattgaggctgaaatgcatcaccggtacccgcgaaccccagtcggtattgacggtgcgcatcagcggactggcctgcagcaccgatttaacccgctcggcgatgtcgagcagagcgtgcggatcgggccccatcacccgccaggcgaccggataaggcgaataagggccaaacaccagctgagtgacgcgcacccgcgcctccggcgccaggccattggccaccgcctcccgcagccgccgcttgagcgcctcgcgggcaccctgcccgtcggtcaacaccaccagtttggcgaaggagggatcgggcaattccggagccatcgccaggtaaaagcgcggcgcgccctggccgatatagctggtgacaatcttcgcctccggctgccgctgcagccagtgctcaattttcgccgccgcggcgctggtctggctaatcgacgacccgtaaggcagctgcacttcaaccagcacttccggacgatcggaggtggggaaaaactgctttttcaccacgctcatgcccaggatcgccacgataaacagcgccaccaccccggcggccacgcgccatttgtgagcaataacccgggtcagcagccgacggaagcgctgatagcgcggggtgtcatacagcgcggcgtggccggccgccgcgggctttctgtccggcaacaggtgcacccccagccagggggtaaaaatcaccgccaccatccaggaggcaatcagcgcgataccgacgatccagaacacattgctggcgtactccccggcggtggactgcgcaaatccattaggcataaaacccacggccgtcaccagggtaccggccagcatgggcgccgcggtatggctccaggcataggccgaggctttgaggcggtcgtacccctcctccatttttaccaccatcatttcgatggcaataatggcatcatccaccagcagccccagggcgaggatcagcgagccgagagtgatgcggtcgaagtttttgccggtcgcctccatcaccacaaacaccacggcgagggttaaaggcaccgccgccgcgaccaccacgcccacgcgccaccccatgctgacaaagcacaccgtcatcaccaccagcagggcgacaaagaatttgatcatgaactcatcgaccgcggcgctgatattcaccgactgatcggtcaccttggtcaacgacatgccgagcggcaggctctgattgatgctggtcgtttcggcgtccagcgctttccccagcgccagaccattccagccctcgcgcatcaccacccccagcagcagcgccggttcgccctgatggcggatcaggaaggtcgcgggatcttcatatcccctctcaaccgtggcgacatcggccagtttcagcgttctgcccccggcaataatcggcgtgtcgcggatctgctgcaggcggtcgaacgccccgtcgaggcggataaagatctgcccgccccgggtctcgatagccccggcggcggtcagcacattctggctgttcagcgcggcaaaaatcgcctctggtgaaaggcccagggtggcgagacggtcatgagaaaacgagagataaatgcgctccgcctgttcgccgaggatattcacttttttcaccccgggaacatgcagcagctgctggcgcagggcttcggcgtcacgcaccagctgccgcggcggttctccccgtgctttcagggcaaagagggcaaaggtgacatcggcgaattcgtcattcatcatcgggccggagacgccggcaggcaggtttttcgcctcgtcgccgagctttttgcgcgcctgataaaactgctccggcacctcggaaggcggggtctgatcctgcagcgacagggtgatcaacgccatgccagggcgggtataggtctccgtgcgatcgtaccactttaactcctggagccgtttttccagcggctcggcgacctgatcctgcatctcctgcgcggtggcgccgggccagacggtaatgaccgtcatttgcttgaccgtaaagggcggatcttccgctcgcccgagtccgaagaacgccaccagcccggcgacggcgataaggataatcaaaaacagggtcaccgaccgctcgcggacggccagcgcggagagattaaaacgcccggcgctcatggctggctcccggcggcattatgctcgcgtcgttccgccagacgcaccgcctcgccctggtgcagaagatgggcgcccagggcgacgatcggctcgccgggcttcagcgggccggtcacccgcgcggtttcatcatccaggccgagcacagttaccggttgccaggagacggtggccggacgagaggcaatgcgccagacgccagggccattacccggatcgtagaccgacgccaggggcaccgccagcacctgtcctggcgcctggtcgttgccgatgcgcagggtcacggtagaccccagcggggcattcgccagcgcgccgttcagtacatagcgcgcttcaaaggtgcgggtggtggcgtcagccgcgtccgaaagcaggcgcagggtcgccgtgaccggctgagattcgctgccatagcgtgtcgccagcgcctcgctgccgaccgccgggcgcagcgtctccggcagttgcacccgcgcttcgcgctgccccgcccgcgccaggcggatcaccacctgcccggcgctgaccacctgccccggctcagcgagggtttccaccaccacgccgtcagcatccgccagcagtccggcatagccggtggcgttttgcgccacattggcctgcgcctgggccgcgctgaggtcggctctcgccgcctctgctgccgcgttaatctggtcgaattccgcggcagagatggcgccgctcgccaccaggccgcgatagcgggccagatcgttggccgcctttttggctcgcgcccgcgcggcatctacggcccgctgttgggactgcgcctgcaaggctagatcagccggatccaggcgcagcagcagctgaccacgcttgacgctctgcccggtttccacccgccgttcaagcacttttcccgccaccctgaagccgaggtcgctttgggttcgggccactaccacgccggtaaaggcccgcgagccgacctccgcgcgctcgacggtcgccacccggaccagcggcggccggatgcgggggtcgtcatgatcggcaggttcgccgcagcccgcgagggccagcggcaggaggcagacggcaagatggacggcgttgagcctgagcatgggtcaccttaatgaaaagaccggatggtgaccgcattctcagactagtgaccaataaagtcaatagtcactaatcagggggagagacttctcaggatcagggaggcaagcagcaccgcagcggtgggcgcggtgtcgagattgtattgcaactgcaccggattgatgaaaggacacatcaccatatacaccgccagggtcgcttcatccagcggggttttgcgctcgaactcacccgcctggcggccttcgacaaggatttgaccaatcagctgctgcagatgaccggcatactgttccgttgaaggccatttatcgcgcgccgcgacggcggcgatgtcgtacagtttgcgatcctcgaaaaacagttcactgccggcctcggtcagcgcccggaacaggcggcgcagtttctcgctggcggacggcgcatcggcgatggccgcgctgacggccaccatgatcttctccagccggctggcgcaaatcgcctcgccaatcgcctgcttggagtcaaagaatttatagatataggctttggaaaagcctatcgctttggcgagatcggtgaccgtcgttttctcatagccatagcgactaaagtgcgccatggccgcgtcaagaatctggtcccgaacgctgtggtcatggggaccacggcttgcaggggtgggggtatttttcgtcatccgtttagcttaatgcgatcgctatcgtttgacaacgagtgacgttattatgatttggtcacaataacgccccgctctgtgatcctcttgccgcgttacgcctcacccgcctcttggtttatcgcgccggcgggcagacaacccaggccttgcagcgtctgatacaccgcgctgtcgagcggggtatgcggttccgcgcctaaaaaatcaaccagtttatcgttgcgcaggcgtaccggcagacgccagagatagtgcatctcgaccatttcgcgcagggtggcgttgaagggcgccgccagcttcaccagccaccagggaaaggacttcgctaccgccctgccgccatagcgggcgaccacccgctggatcgcctgactcatttcgctgccgtccgagtcccagtggccctgcatatgaaagcgagcaaacggctcaagctcatgcctgcgggccagcagcgcggcgatggtgtcggcgacgtcgggcagccaggcccactgatgcccgacgccgatcgtccccgggtagctaatgatgcggggaagctgaccaggcttgaccagcccctgcgaaaaccagttatttccggcgcgcgggccaaaaaaatcgcccgcccggacaatcaacgcccggccgccgcgctgcacgtaatcctccagcgccagctccatcgccacccggatggcgcctttgcgggtcaccggctgttgtgcggcctcttcagcaatcagcggaaaggcatccggtccatagttgtagaccgtgccgggcaggactacaagcgcccgctgccgttcggcggcctgcagggtgttgcgcagcataggcagtacctgttgccgccagtgccggtagcccggcggattcaccgcatggacgataacgtcgcaaccggcagccgccgccgcgacctggccgccatccagcgcgtcgccggctatccactgtatgccatcttcgggatcacgtatccgggcgccgcgcttcagcgcccgaacctgccagttgtctgccaccagccggcgcgccacttccccgccgatgcccccgcttgctcccagaataagtaccttgccgctgctgttcatcctctttccccgttcgctaatggatgcttgacagcctacctgtggctcatatcaaatgaaattgcataccatcgtcgagcggctatacatatttgtatgaatacctctattccctgggagtggtaccgaacctttctcgccgtcctgcaggaaggctctttatcgggcgcatcgcgtaccctgaacatcactcagccgacggcggggcgccatattgccgggctggaaaacgccctcggccaggccttatttacccgctcgcaaaccggcctgctggcgaccgacgcggcgctggcgctgcgggtgcacgccgaggcgatggacaataccgcccgggcgctggaacgcaccgcggctaacttcagtcgcgacagagccgagctgcgtggcgtggtgcgggtggccgccagcgaggtggtcggcgccgaggtgctgccgccgctggttgcccggctcaggcaggcgtgcccgaatatcgtcatcgaactgatgctctccaatcggtttcaggatctgcttcaccgggaggcggatattgcggtgcggatggtcgccccgcagcaggagcagcttatcgcccgccgtctcggcaggatcgagcttgggttacatgccaccgccgcctacctgacgcgccagggcctgcccgcgaccctcgacgatctggccagccacgcgctaattggttttgatagcgccacccctctcgtgcgccgggcgctgcaggcttacccccgttttcagcgcgaggcgttcgcgatgcggaccgatagcgacctcgcccagttgagcctgatccgcgccggagcggggatcggcatctgccaggcgcctcttgcggatggcattattcccctgcagcgagtgctggcggccgacttttctctgtatcttgatacctggctggtaatgcatgaggatctgcgccacagccctgcctgtaagcgggtatttgattttctcgcccaggggttgcaggcgtatattcgtggcccactggcgagctgacccgccccatcgcgcgggcatttcattgcctgcggaaatagtcactcattgacactgtaaatatggcattgtataaaaccccgccccaataatgagtttcatttgcattactcccatttgctggtcatccactcgcctgtttacaaggatagcgtttaatgaagaaggtcctttgcgcgttaggcttgatgttcaccgccgtcagttccgcgctggcaacaacctaccccctgacgattgaaaactgcggctatcaggagaccttcacccggccgccggagcgcgtggtcgcgctggggcaaaatacggtcgaaattctgctgctgctcgggctgcaaaagcaggtggtcgccagcgccttctggccgaccagcgttttaccgcagctggctgagcaaaacgcgaagattaaaaccttgacggtggaaattccgagcctggaatcggtgctggcgcaaaatcctgatttcgttcccgcccagttgccgctgctgctggggccggaaagcaaagtcgccaggcgtgaagatctcgctaccgtcggcgtaaacagctacgtctcaccggggatgtgcgccaccaaaaaggccaccggcgatatgtacggcagccggcaaaagctgtgggatatgacctggctgtatcaggaaattagcgatttttcccgcattttcaacgtcgaagatcgtggtcaggcgctgattgccgatttcaaaaaacgtgaagccgacctgcgccaggagtttggtaaaagcaaaaaggatctctccttcgtcttctggttctccagcgcctcaccttcggccgatgcctatgttggcggcaaaaacagcgcctccggatttatcgccagcgtgctgggcggacataatgcgattacctccgaaaccgagtggcccacggtgagctgggagagcattattgccgccaacccggatgtgatcgtggtcgccagcctggaccgtaaccgctgggcgctggataaggccgaggagaagatcaaattcctcaaaagcgatcccgccgtcagccagctggaggcggtgaaaaaaggccatatcgtggtcatggacggtcaggcgatgaatccgacaattcgcacactttacggcgcggaacaggtgggcgagcagctgagaaaaatggggctgaactgatgagcgtcgccgcgattgagacgcgccgcagcatgctgctcaccggctggtgtgtactggcagcgatcgtgctggcgctggtgatagcggtgggcgtcagcgtcggcgagctggccatcccgctgcagaatgtcttttacgctatcagcaacagaaccggcttaaccgctgagccgctcaaccgtatctatgagagcgttatctgggatttccgcctcagccgcgcgctggtcgccgcctgctgcggcgcaggcctcgctatctgcggcgtcgtgctgcaaagcctgctgaaaaatgccctcgcggaaccctacgtcctcggcgtctccgccggggcctccaccggcgcggtgtcgatcgtggtgctgggcattggcgctggcgcaatttccctctcggccggggcctttgccggggccttcgccgccttcgcctttgtcgccttgctgactaacggcgcgcgcggcggcaatgagcgtacgattcttgcgggcgttgccgcctcgcagttatttaacgccatcacggcctataccatcagcacctccgccagcgcgcagcaggcgcgcgatgtgatgttctggctgctgggcagcttcagcggcgttcgctggcccgaattccagctggtcattgtggtggtgctcgcgggtctggcggtctgcctgtggtatgcccgggcgctggacgcgttcaccttcggcgacgatgccgccgcctcgctggggattgctgtgccgcgcgtgcgcctgatcctcttcaccactgcggcgctgatcaccgccaccatcgtcagcatggccggctcaatcggctttgttggcctggtggtgccgcacgtgatgcgtttcttctttggcccgctacaccggacgttgctgatcgccagcgcgctggcaggggcgatattgatggtactggcggacattgcgtcgcgcctgctgattgccccgcagagtctgcccgttggggtggtaaccgccctggttggggtgcctttctttgccgtgattatctaccgctcaaggaataagtgatgagtatttgcgctgaaaatattacctggaaggcaggcaaaaaggtcatcgtcaataatgtctcgctgcgggtgtcgcgcggcgaaacggtcggactgctggggcccaacggctgcggcaaatcctcgctgctgcgcgttctggcgggcctgcgccgcccggatgcaggtcgcgtcaccctcgacggccaggacatcacccggatggcgaaaaagcagctcgcccgccgcgtggctttcgtcgagcaacacggcatgaccgaggccaatatgcgggtgcgcgacgtcgtgcgcctgggacgcattccccaccactctccgttctcaaactggagcgctcaggatgacgaggcgattgccgccgcgctgcagcgggtagcgatgctggagaaaagcgaacagggatggttaagcctctccggcggcgagcggcagcgggtgcatatcgcccgcgcgctggcgcagagcccgagcgaaatcctgctggatgagccgaccaaccatctggatatacaccatcagatgcagttaatgcagttgatcagcgagctgccggtaaccagcattgtggccattcacgatcttaaccatgccgcgatgttctgcgattcgctgatcgtgatgcagcaggggcagatcctcgccagcgggacgccggaggagattttgtccgaagcgctgctgtgggacgttttccgggtgaaaaccaaaatcgagatctccccttaccacggcaaaaagcacattcatttcatcgtttaggttgggcggatatgcctcttttctccctgcgccctgcggcaaccctctggcctccggtgttactgggaagccagttcgtttttaatattggcttttacgcggtcgttcctttcctcgccctcttcctgcgcgacgacatgctgctctcaggcggacttatcggcctgatcctcgggctgcgtaccttctcccaacagggcatgtttatcctcggcgggacgctggccgaccgctatggcgctaaggcgatcattctcgccggctgcgtcgttcgcgtcgccggttttctcctgctggcgtgcggggcgtcgctgtggcccattatcctcggcgcctgcctgaccggcgtcggcggcgccctgttctccccgtcgatagaggccctgctggcgcgggccggcaccctcagccaggccaacgggaaacgcagccgcgccgagtggtttgcgctgtttgcggtatgcggtgaactgggagcggtgatcggcccggtggccggaggcgtgctgagcgggatcggctttcggcatatcgccctcgccggcgcgggaatatttcttctggcgctggcggtgctctttttctgtctgcccgccgacgggcacacgacaacaacgcgcagacgagtcccatggtggacgcctttgcgccagccgcgctttgtcgcgtttattctcgcctacagctcatggctgttgagctacaaccaactgtacctcgccctgccggtggagatccaacgttccggcggccgcgagcaggatctggcgccgctctttatgctggcctcgctgttgattatcaccctccagctccctctcgcccgcttcgcccggcgaatgggcgccgtgcgcatcctgccgttgggctttctgctgctgtcggcttcctttgccagcgtggcgttattcgccgccgccccacccgccgaaggttggctgcggttaatgccggcggctggttttgtcacgctgctcaccctcggccagatgctgttagtgcccgcagccaaggatctgatcccgctgttcgccgaggagtcgacgctgggcgcccactacggagcgctcgccaccgcaggagggtgcgcggtgttagccgggaatttactgctcggtcatttgcttgaccaggcgctcattccctcgccgcaggcggtttatccctggcttctgctggcgctgtttccgctgtgcagcgccgtcgccctgcgggcaatctgtcgcccgctggcggcaacatgatgcagagcgggcaacagcccgatctggaagagaaccgacgataaagtacaccgcctgggaaagataacgggcgcgccccgccttactttgccgccagctcgcgacgaataatctcggcgccggcgctcagggcgtgcagtttgccggtcgcgacatggcgcggcagcggcgccataccgcagttggtggacgggtagagtttgtcggcatcgacgaacgccagcgccttgcgcagggttccagccacctcttccggggtttcgatagcatggctggcgacatcgatcgccccgaccatcacctttttaccgcggatcaactccagcagatccatcggcacgcgcgagttgtggcactcgagagagataatatcaagggacgatttctgcagctgcgggaaagcctcttcatactgtcgccactcggagcccagcgtctttttccagtcggtattggccttgatgccatagccgtagcagatatgcaccgctgtctcacacttcagcccttcggtggctcgttctaaggcggcgatcccccagtcgttgacctcatcgaagaagacgttaaaggccggctcatcgaactgaataatatcaacccccgcagcctctaactctttcgcttcctgattgaggattttggcaaattcccaggccagcttttcccggcttttatagtggttgtcatacagcgtgtcgatcatggtcatcgggcccggaagcgcccatttgatcggctgactggtgagctgccgcagatagcgagcgtcctccacgaagaccggtttctggcgctccacggcgcccaccaccgtcggaacactggcctcatagcggttacgaattttcacgatctcgcgtttggcaaaatcaaccccgctgaggtgctcgatgaaggtggtgacaaagtgctgccgcgtttgctcgccgtcgctgacaatatcgatcccggcccgcagctggtcgtcgagggataaccgcaaggcgtcgcgcttgccggccagtaattcttcgctggacagtttccagggcgaccacagggtctctggctgcgccagccaggaaggtttcggtaaactgccggcggtcgatgtcggaagccatgttttcatagtcattagccttttatatgggtttagcaaagcgcgaaattagcagaccattgctcaagcaacgtcttgtgcgggttgataaaatgttgttgtgtaaatttcccctgctcaatcgccaacaggctgcgctcttcccggtcatagacgatttttgttaatgaatgatccaggtggctgagattgggctgatagtattgccccgccggggagttggcattgtagatctccgggcgatatattttctgaaacgtctccatcgtgctgatggtggcgatcagttccaggctggtgtaatcgctgagcagatcgccggtaaaataaaaggccaacggcgcgacgctgttttttggcataaaatagcgtacctgcagacccattttgctgaaatagcgctcggtcagcgagacgccttcctgagcatattcaatgccgaggaccggatgttcgttaccggtgcgatggtaaacatctttactggagacgctcaggcaaatcaccggcgccttgctgaagttggcgcgccaggcgctggattgcacaaaatccttaaagatattgccgtgcaactcgccaaagttttccggtacgctgaagcgactctggtccttattatgttccagaagcagtacgctaaaatcgtaatcccgcacataggaggagaagttattgccgacgataccggcatgacgctccccgctctttttatcgacaatatgcgtttgcaggatctcaatcaccgggaagctggcgctatcctgagcaatattcatctcgacagaaataatatccagttccaccgcatagcgatcgttatggggattatcccagtgggccaggctattaaaacggttattcatcatgattaacgtattgcgcagattttcctcacggttcacccctctggctaaattagcgaagttggtggtaatacgcgtattttccgcagggttatagttttcatcaaaccgggtgcgcttaatcgtataggtaaatttattattcatggcgattgtccatcctgatggcgggcataaagcgaacccggcggaatactctccaccagcctggcgacgcggagtcaggccgggcgcgcttcaaccggtaaatgttgttgattcgttaatgaacctatttttgccagagtcagcgctggagggaaagcgacttaaattcaatgcaacatgagccatcctcatgttgctccaggcggtggccgatggccgacgcaggccgacaatattagtcaataaacgtttgttcaatggaagtaggcagggtacactctttaaccactataagatgggcttacctgcccgccgtacccgtttagctggagcttttgtcgtacagaatgattgttgatatcagtattatgtcgatgtgcatggccgtactgctgattatgagcgtactgctgaattaagaggctcccgaacgcaatgacactcgctctcatctgacctccacattcgcgaggaaaaaagaagattcagaggattcgcgccgcctgggattgttccgcctgccggcaccctctactcttttgggacttgcttattgaggaatcccggatgaaaaaagctctgcttgccctgttcgctatcgccaccgttaccgccgccagcgcctttgcggctgataaaaccgacgtcccggcgcctgtcatcgataacggagtccgcccgccgatggagagggatcgtggccccctgccgccgttcccgccgcagcttccgccgcacagaccggtgctgttttcagccacggtagcaaccgatacgccagcggaaaccattaacaaactgaccgcgctgatccccgccggccaggcgaaacactacgaagtgcacgttgaggtggtgccggttggcgagggaaccgacagacaatagcccaaaggagatctacgctgtcatctgtcagcaataaaaaagctgccgcatatcgcggcagcttttatgtatttatttacagctgagcagctgaaaattagctacgcactttccggtagataaacagtaccaccagcgcaccgataaccgctaccacgaagctgccgaaattaaacccatcgaccttgccaaaaccaaacagggtactgatccagccgccgaccacggcgccgatgatccccaaaataacggtcacgataaatccgccgccatcttttcccggcataatccacttggctaaaataccggcaataagtccaaaaatgatccaggaaagaatacccatggttaaccgtcctcttgttacctttaagcatttagtattgaaaagagtagcataaataacgagagtggatcggtaataatataaatattagataattccctgccgacgcgcggctgatcttgtgacaacctctctggctctggcaggccggctctcgcttattaccttaaaaaaagggaggctattcgcctcccgccatgcggcttatattaccgcggtggttagtcgtgatgaacaacataaccgcgactgttcgtcgaagatttcaatttgccagacctgatggcgcgtcccgacgtgcagcgctttgcagacgccgcgcacccggcccccgcgcgccgaacggatgtggttggcgttaacctccagccccaccaccttttgttcgccttcgctgcacagatagcctgccaccgaccccagggtctccgccagcaccaccgacgctccgccgtgcagcaggccaaacggctgctgtgtgcggctatcgaccggcatagtggcctccagcgtatcgtcggtaacggtctcaaagcgaatatcgagcagccctaccatgttcccctcaccgagccggttgagctgctccagcgtggcctgacgtttccaaatcatccgattatctccagtaacgcctgcagcgggtggcgaacgccgctgccttcaatacgcttcacctgactgcggcaggagtagcccgtcaccagacagcggtttcgcggcagccgctgcatcgcctgctgccaggagagcgcgtaaatggccaacgagtttgcgtggtttttcacttcatgaccataggtgccagccatcccgcaacacccaacgctgacgttttccagcttcgcgccgaagtgggcaaaaatatctgcccactgctttgtcgccgccggtagcgcggtcacttcggtacagtgaccgaacaggtaccagggctcaccgcccagatcgggacgggcgtcgctggttagggccttcggcaaccactcatggactaacagcacctggaaatcgccgcgcttgtcgccgagcgtctgcttgtactcatcgcggtagcagagcaccagcgccggatcgacgcccaccagcggcatgcccagctgcgccacgcggttgaggaagtccgccgtcttctgcgcggtgcgcgcgaagcgggtgaggaagcctttgatatgctgcgccttgccgttcggcgagaacggcaggagcaccggctgatagcctaaggcctcgaccagacggataaagtcggccaccacctgggcgtcgtagtagctggtgaagggatcctgcaccaccagcaccatcttcgctttctgctcggcgctcagcgcttcgagctgctcaagggtcatattggcggaacggtggccggccatctgctgcttcagcgacggcgccgagagcagcggcagatcgaccatcccgatatgcttctccgacagctttttcagccacggctggttaataaaaaagttaaaggtcttcggcgcctgcgccatcagcggcgcataagattcgaccgaggccaccagatgatcgcgcaccggccgcagatagcggctgtggtacagctgcaggaagcgcgagcggaactcgggaacatcgattttgatcgggcactgggtcgaacaggctttacaggccagacagccggacatcgcctctttgacctcatgcgagaagtcatactcgcctttgcgcgcatgccagctgttgcgcgtgcgcgccaccagcgagcgcaggctgacgccctgctccggcagcgccttctccagctggttgggatcgacgccgcggtcggccagcaggcgcagccattcccgcaccagcgtcgcccgccctttcggcgagtggatgcgctggttgctgactttcatcgacggacacatcggactcttgacgtcaaagttgaagcacagcccgttgccattacactccatcgccccacgccagctgctgcgcaccgcgatggggatctgccgatcccaggtgccgcgcttcgccgcatcgactttcatcatcggcgcgtcgataccttccggaggacagattttccccggattcaggcggttatcgggatcgaagaccgctttgatcttgcgcagctcggcatacagcgtctcgccaaagaaggccgggctgtactccgcgcggaaccctttgccatgttcgccccacagcaggccgccatacttcgccgtcagcgctaccacctcgtcggagatctgcttcatcagcacctcctgctgcggatcgcacatgtccagcgccgggcgcacgtgcagcaccccggcatcaacgtggccaaacatgccgtagctcaggccgtggctgtcgagcagcgcgcggaactcgacgatgtaatccgccagatgttcgggcggtacgcaggtgtcctcggcgaaaggaataggcttggcggcgcctttggcattgcccaacaggccgacggccttcttgcgcatggcatagatgcgctccacgccttcaagatcgtgacagacctgccagccaatgacgcccgcctcgctgccggccatcagctcgtccagccgctggcacagggtagtaacctgctggtcaatcagcgccgcgtcatcgccggcgaattcgacgatattgagcccgagcatctctttatccggtacgtcggtgatcagttcgcttaccgagtgccagacgatatcctcgcgcgccagattgagaactttagaatcgacggtctccaccgacagggctttcgcttcgaccataaagggcgcattgcgcagcgcagagtcgaaggagtcatatttgacgttgaccagacggcgcaccttcggcaggcgggtgatatccagccgcgcttcggtaataaacgccagcgtcccttccgaaccggttaaaatacgggtcaggtcgaactcgctcatctcatcgttaaagacgtgacgcagatcgtatccggtgaggaagcggttgagtttgggaaacttatcaatgatcaggtcacgctgcgccttgcagcgctggtagaccgtgttgtagatccggccaaccgtcgagggggtattgcccagcgtctccgccagcgccaccggcaccgcctgggtatcgaggatatccccgcccatcagcaccgcccgcaggccgagcacgtgatccgacgttttgccgtacaccagcgatccctggccggacgcgtcggtgttaatcatcccccccagcgtggcgcggttgctggtggatagctcaggcgcaaaaaagtaaccatagggtttaagaaactggttcagctgatctttgatgaccccggcttcaacgcgcacccagccctcttcggggttaatctcgatgatgcgattcatatagcgggacatatcaacgataatcccgccgttcagcgcctggccgttagtgccggtgccgccgccacgcggggtgaaaatcagcgatttaaaacgcggttcggcggcaacgcgcgccagcagcgccacgtccgccgtggatcgtggaaaaatgaccgcatccggcagcagctgatagacgctgttgtcggtggccatcgttagcctgtcggcatagctggtggcggtatcgccggtaaaaccctgttgctccagtacctgcaaaaaattcagcaccagttgaactacccctggcgcctgagaaatttgtgggatcatcacgcttgaccctgcctgactatgttgtgtttgaaaatattgtgttggtgctaactaaacgtttgcgtagcgcattcaactttttatcacatttttttcatatgcgcccacgtgttttctgtgcaaaatcagcccggcaaaattattgatattattatcagtatatggatttacgcggcgccagctgtttggcgcgactggaaaggtaaaatttctctatgattaatccccatcagcctcgggacattccgcaaatactgctgtcggtgctgttcctggccctgattatcatatcctgcctgtgggttgtgcagccgtttattctgtccttcgcctgggccggtacggtggtgatcgccacctggccggtgctgctgcgtctgcagcgtgtgctgttcggcaaacgactgctggcggtgctggcgatgaccctgttgctgtttctgctattcgttattcctatcgctctgctggtcaacagcctggtggataacagcgttccgctgatcaaactcatcagcagcggaaatgtgacgctgccggatttcgcctggctcaacagcgtaccgctggtcggcgataaactgtactccgcctggcacggtctgctggatatgggcggctcggcgattatggccaaggttcgtccctatattggcaccaccaccagctggtttgtcggtcaggcggcgcacatcggcaagctgctggtctactgcggtttgatgctgctgttcagcgcgctgctctactggcgcggcgagcaggtggcctatggtttccgctacttcgccacgcgcctcgcggccaaacgcggcgacgccgcggtgctgctggccggccaggccgtgcgcgccgtggcgctgggcgtggtggtcactgccctcactcaggcggtactgggcgggattggccttgccgtctccggcgtgccctacgccgctctgctgaccgtggtgatgatctttacctgtctggttcagctcggccctttactggttttggtgccgtcgattatctggctttactggagcggggacaccacctggggcaccgtgctgctggtctggagctgcgtagtcggcaccatggacaacgttattcgtccggtgctcatccgcatgggcgccgacctgccaatgatccttatcctcaccggcgtcattggcggcctgatcgccttcggcatgatcggcctgtttatcggtccggtgctgctcgccgtctcctggcgactgtatgacgcctgggtgcatgaggtgccgccgccgccgaaagaccctgacgtcgtccttgaagagctcagtgagctggaggccggtcgcaagtaatgcctggcaggcggggagacccgcctgtttctttgcccgcatattgttaagcaaaatttattgatcgccggcaatgcgctggccccgcgcgcccttcacctcgctttcctcccccggtccttcacaacaatttaactattgagaggaatctgatcgacggcaaaggccccgctgcctactattagctcacggttataaatcaacaccttgatttataagcatggaaatcccctgagtgaaacaacgaattgctgtgtgtagtctttgcccatctcccacgatgggcttttttttgccctgcacatcacgacaccagatagcctgacaccggtaaaaaaaatccccggcatcgctgccggggatcggtcctgtcagggcgaacttattttttcagttccgccagacctaaccaggtttgtaccacggtatccgggttcagggacaagctatcaatcccctcttccatcagccaggcggcgaaatcctcatggtcagacggcccctggccgcagatgccgacgtatttaccctgtttcttcgccgcgcggatggccatcgacagcagggctttcaccgcgtcgttgcgttcatcaaacagctcagaaaccacaccggaatcgcggtccagaccgagcgccagctgggtcatgtcgttcgaaccgatggagaagccgtcgaagtactcgaggaactgctccgccagcaaggcgttcgatgggatctcgcacatcataatgatcttcagcccgttctcgccgcgcttcagcccctgacgctccagctcttcgaccaccgctttcgcctgggcgacggtacggacgaacgggaccatcacttcaacgttggtcagtcccatgtcgttacgcacgcgcttcatcgcttcgcattcaagggcgaaacagtcgcggaagctttcggaaacgtagcgtccggcgccgcggaagccgagcatcgggttctcttcttccggctcatagcgctcgccgcccaccaggttggcgtattcgttcgatttgaagtccgacagacgcacgatgacccgtttcggatagaaagcggcgccgagggtggcgatcccttcggtcaggcggccaacgtagaactctctcggcgaatcgtagcctttcatcagctcgcggatttcgttctgcaggcccggctcctggtcgtcaaactccagcagcgcgcgcggatgaacgccaatcatacggttgatgataaattccagccgcgccagaccgacgccttcgttcggcaggcaggcgaagtcgaacgcgcgatccgggttgccgacgttcatcatcaccttcagcggcagatccggcatgtcgccgacgctggagctcttgacgctgaagtcgagcagctcggcgtagacatagccggtgtcgccttcggcgcaggagacggtgacattctgattttcctgaatgcgatcggtagcatcgccgcagccgaccaccgccgggatccccaactcacgggcgataatcgccgcgtgacaggtacgcccgccgcggttggtgacaatcgccgaggcttttttcatgatcggttcccagtccgggtcggtcatatcggtaaccagtacgtcgcctggctcaatgcgattcatctcgctgatatcgtggatcaccttgaccggaccggcgccaatgcggtggccgatggcgcgcccttcggcgatgatctgcccctgagcgtggagggtataacgctccatcacctggccgcgggaacgcacggtttcaggacgcgcctggacgataaatagcttaccggtgtggccatctttcgcccactcgatatccatcggacggctatagtgcttctcgatctgcaccgcctgcttcgccagctcctgcacttcctcgttgcttaacgagaaaatatcgcgctgcgcctgcggcacatcttcgatacgcacctgtttaccgtgctcctgggtcggcgcgtaaaccatacggatctttttcgaccccatggtgcggcgcacgatcgccggacggccagcggccagcgtcggtttgtggacgtagaattcgtccgggttcaccgcgccctgcaccaccatctcgcccaaaccccacgccgaggtgataaacaccacctggtcaaagccggattcggtatcgatggagaacatgacgccggaggaggccagatcggagcggaccatcctctgcaccccggcggagagcgccacgccgcggtgatcgtaaccctgatgcacgcgataggagattgcgcgatcgttaaacagcgaagcaaacacgtgcttcacggcaacgagcacggcgtcaaagccctgcacgttgaggaatgtctcttgctgtccggcgaaggaggcgtccggcatatcttccgcggtggcggaagagcgcacggcgaatgaggcctcggcgtcatcggcggacagcaggtcataagcatcgcgaatcgcgttttccagttcgctctggaagggggtatcgatgatccactgtcggatctgcgcgcccgctttcgctaatgcggaaacgtcgtcaatgtcggtttcatccagcagcgcatagatgcgctggttaacaccgctttggtccaggaactgattgaaagcatcagcggtggtggcaaacccgttaggtacggaaacacccataccggacagattcgtaatcatttcaccaagggaggcatttttgcccccaactctgtctacatcattcatgccgagttggttataccaaagcaccagcggtgacgagccattgttggacatcgagacaatccttttgtgatttaataccagtgaaaaaaatttcacgatcgactgcaggattatcctgacatatttatgaagctgaaaaaaacggtgaatcgttcaagcaaattattttttcatttttcggactgttcccccgatattgctaacttgatgatttttaggaattctgatgaaaaacgctggaaataacggcgacaaaaagaaaatgaaccacccttttcataaaaaacaaaaatagcgtttcaattttaacaagagacaaatcaaacagggatatgcttaaatttaatatccgctttcaggcaattaaactcattataccggatggtcaaaatggaaagtgctgtagatcgccacgtattttatatttctgacggtaccgccattacggcggaggtgctggggcatgccgtgatgtcgcaattcccggtcgccatcagcagcgtaaccctgccgtttgtggaaaacatcagccgcgcgcgggcggtgaaggagcagatcgacgccatctgtcagcaaacgggtattcgcccgctggtgttctactccatcgtcatcccggaaatacgcgacattattctgcaaagtgaaggcttttgtcaggatatcgtgcaggcgctggtggccccgctgcagcaggagctcaacctcgacccgacgccggtggcccaccgcacccacggcctcaaccccggcaatctgattaaatacgatgcgcgtatcgccgccatcgattataccctcgcccatgacgatggcatctcgctgcgcaaccttgaccaggcgcaggtgatcctcctcggcgtctcgcgctgcggcaaaacacccaccagtctgtatctcgccatgcagtacggtattcgcgccgccaactatccgtttatcgccgacgatatggacaatctggtgctgccggcctcgctgaaacccctgcagcataagatgttcggcctgaccatcaatccggagcgtctggcggcgatccgcgaggagcgccgggagaacagccgctacgcctccctgcgccagtgtcggatggaagtgaccgaagtggaggccctgtatcgcaagaataaaatcccctgcctgaacagcaccaactattccgttgaggaaatagcgacaaaaatcatggacatcatggggctgaatcgtagaatgtactaatacactagtacattattaaaaatttgtttatgctatcacccgtggcctatacaggatcatgccctgctcttgcaataagcagggattggtttatcgtgatgcgcatcacttcccggcattttcgccgcggaagaaacagatttttgagaccccaatgaataaaacagacgaattgcgtaccgcgcgcattgagagcctggtaacgcccgcggagctggcccagcgccatcccgtgacggccgacgtggctgcccacgtctcggcctcccgccgccgaattgaaaaaatcctcaacggcgaagaccgccgactgctggtgattatcggcccctgctccattcacgacaccgacgcggcgctggagtatgcccgccgcctgcagggcatgcgcgagcgctaccagccgcagctggagatcgtgatgcgcacctactttgaaaaaccgcgtaccgtggtgggctggaaaggcttaatctccgatcccgacctcaacggcagctaccgggtcaaccacggaattgagctggcgcggcgcctgctgctgcaggttaatgagctgggagtaccgacggccaccgagtttctcgatatggtgaccggtcagtttatcgccgatctcatcagctggggggccatcggggcgcgcaccactgaaagccagatccaccgtgaaatggcctcagcgctctcctgcccggttggatttaaaaacggcaccgacggcaatacgcgcatcgcggtggacgccatccgcgcctcccgcgccagccatatgttcctctccccggacaagcaggggcagatgacgatttaccagaccagcggcaacccgtacgggcatatcattatgcgcggcggcaaacggccaaactatcacgccgaggatatcgccgccgccggcgaggcgctacgtgaattcgatctgccggaacagctggtcgttgatttcagccatggcaactgccagaagcagcaccgccgtcagctggaggtgtgcgccgatatctgtcagcaaattcgcgcgggctccaccgccatcgccgggattatggccgaaagcttcctgcaggaaggcactcagaaagtggtccccggacagccgttgacctggggccagtcgatcaccgacccctgcctgagctgggaagacagcgaaagattattgagcgagctggctgcggccaccgccacccgcctgtaactgctccgcccgccgcgcctgcggcgggcaattctcttcgctgactcccctaccaaatccggtaacacgataaataacgcttgccgtcaaaaacaacattattgataatgattatcattgttgccttgatttttattctgagagctatgacgcgtatggataacactgccacagctgaaaaaccaaaagacaatgccccttatcccgtggcgacggacagagagatcagcagtcgggttctgttaggcagcgaaggacgagtagtgattgagcatggcggccagcgctatctgctgcgccagacccacgccgggaagttaattctgaccaagtaaacgccccgctgaacgcggggcgaggcaagttagctcgagcagctgacttccagacgtttcccccagtccggcgggcggcggacgtagtcgtcctcgcgatcggtaaaggggtctgccagcgcggcatgcaggcgctccagctcgcccatatcgcccgcctcagcctgctcgatcgcccgctgcgccagccagttacgtaacaccagcgccggattcacgccctgcatcctctgctggcgctgcgcgtcgtccacctgttcatcacgcagccgcgcacgatacccggcaaaccagctgtcaaaggccgcgcggtcgataaactcatcgcgcagcggcgatgcggcgctgagctgttcgctgtggctcagcaggcggaacgtccgggtatagtcgctcttctcgcggatcatcagggcaaacagcccgtccagcaggtcgttatcccctttctgctggctgaacaggccgagtttatcgcgcatccgctggccataagcggtcagcaaggcgtgctgatactcatccagcgccgcgtttaacgcttcagcgctgataaacggcgacagcgattgggcgagacgctgcagattccacagccccaccgccggctggttttcaaaactgtagcgcccctgataatcggagtggttgcagatgaagtccggttgaaaatcgtcaaggaagccatacgggccgtagtcgatggtcagaccgagaatcgacatgttgtcggtattcatcaccccatgggcaaagcccacggtttgccagctggcgatagtctgcgcggtacgcatgacaatgtcacggaaccataacaggtacttatccgcctcatcctgcagctgcggccagtggtggcgaataacatagtcggccagttgctggaccttctgcggctcacggcgatagtaaaaatgttcgaaatggccgaagcggacatggctctcggccacccgcatcagcatcgcgccgggctccacgcgctcgcggtagaccggggtatcgctggtcaccatcgccagggcgcgcgtcgtcgggatccccagagcgtgcatcgcctccgacgccagactttcccggatcgtcgagcgcagcacggcgcggccgtcccccatccgcgaataaggagtcaggccggcgcctttcagatgccagtcgtaacggcggccatccgccagctgctgctcgccgagcaggatcccgcgtccgtcgcccagctggccggcccaggcgccaaactgatggccgctgtatacctgcgccagcggcgacatgcccggaagcagcgcttcgccgccccagacaccggccccgctttcaggcgcaaacagggcgtcgggcacccccagctgttgcgccagcggggcgttgcgccagatgagtcgggcgttatccaacggcgttggtgacagggaagtgtaaaagtccggcagttcatcccgccagtgggtggtaaaagaaagggtcatggttcctcctctctccagtgtagtgcctggaacagcggattaacacgggcggagtgcagggttatcggcataaaaaagggaagcgttcgcttccctcttgcttctgaatgacgtcagattcgccgcgcctgccagaactttttgttccagtagacgttatccagcgaggaacgggtgacgccctggctggtggaggcgtgaataaactggttgtcggtatcgtagatgccaacgtgcaggccgctctcccctgagccggttttgaagaacaccagatcgccgggcagcagatcgcgcttatcgatgcgggtgccgatttccgcctgctcgcgggtttcacgcggcagctggagggcaaatttatcgcgaaacgtgcgcaccacgaagccggagcagtcaacgccgcgcggcgtcatgccgccgtagcgatacggcgcgccgcgccagctgcgcagctgctcgttcagattcgccaccaccgtgatggagtcagccagccgaggattcggcggcggtgcccgatggctgctgcagccggctaaaattaacgccgccgccaacatgaaccagaagcgcatttcagatgatccctctgtccctagtctctatcgcaataatttagcttgtttatcaatatagtgacaagataactgcgtgctactgtgacgcgatgagcataatatgaccggccacctcaacgcgctggaacgggatcgcataggcggcggttaaattttcctcattcagcacctcggcggtctccccgcaggcgatggcttccccctggcagagcagccagctctgaccggcgtggcgcagggtatggttgagatcgtggctgctcatcaccaccgcaatccccgccgcgctcagctcgtgtaacagccgatccagcgccgcctgctgggccacatccagactgttcatcggctcatccagcagcagcagctgacccgcggaattattcaagggatcgatctgcaggatcactgccgccagccgcacgcgctgccactcgccgcccgacagctgattgaccggacggcccagcttattgtccagaccaagcctggccgcgatatcgctcagacgggcgctatcacccagctgctgcatatgcagcgccaggtagtgccataccggcatggcgaacggcggggtctggtgttgacacagatatccgcgacggcgcgccagctccctcgccggccactcgtcaagcagccggccgttaaaatgaaccgtgccggggccgtcggacagccccgccatgcgggtcagcagcgtgctcttccctgcgccgttcggccccaccagatggacaatctccccggcgcgaaaggccgcagaaaacggggccaggcgccccgccgcttctacatcctgtagctgcatcagaaacgacattattgcgccagcgctcctttaatcgccgccaccagctgcggatcgtccggcgtcatatccggcgagaagcgctgaatgacgttgccctggcgattgatgaggaatttttcgaagttccacagaatgtcgtccacatacagcggcgcccggcctttgctggccatccgctcataaaaaccgctgccttccggggccaccgctttcggcgcggcggcaatcagtttttgatagagcggcgcgcgatgttcgccgttgacgtcaattttgctaaacagcgggaaggtgacgccgtaggtggtgctgcagaaggtcttaatctcctcttcactgcccggctcctggccgaggaactggttgcaggggaaccccagcacgctgaagccctcggcggcaaactgcttttgcagatcctcgagttgctcatactgcggcgtcaggccgcatttcgaggccacattgacgatcagcagcaccttgccggcaaaggatgccagggtggttttctcgccatcaatggtcgtcacttcggtattcagaatgtcatgttgcatagcctgtcctcaatggataaaccggtttccggtgaaggtgatccctttctactgtagcggattcagcgcccgccattctactgccattacccccgagttgtcgcatgatgtaacagcgcttcgctggccgccggcaacatgaaatcctctcaattgggccgtcgaccatttccgtgtacagtgttccatgaatgtaatatggtttcgttacttgttaatttaagagagttttagtgatgaagaagttgtttagcctggcgttaatcgccacctctgtcgccctgctgagcgcctgctccccggatgaagataataaagtaaaagtcgctatcaataccgggccggacgaagccatctggaaagtggtggagcaggtggcgaaggataaataccacctcgacgtcgaagtggtctccttcaatgattatgtgctgcccaacgaagcgctgaacaacaaagatgtcgatgccaacgccttccagaccctgccgtaccttgaggcgcagtcgaaagaacgcggctataaatttgcggtggtcggtaaaacctttgtcttccctatcgccgcctattctcaccggatcaaaaatatcagcgaactgcccgaaggggcgacggtgaccatctctaatgaaaccaccaccctgggccgcagcctgctgctgcttcaggcgcaggggttactcaagctgaaaccgggcgtcggctatttacccaccacgctggatatcatcgacaatccgaaacagctgaaaattgttgaagtggataccccgcagctgacccgtacccttgacgatccgaacgtcagcctgtcaatcattaacaccaacttctccgcccaggcgggcctgtcggccgcccgcgacggtctgtttatggaggggccggattccccatacgtgaatgcgatagtcgcccgcgaggataataaggacagcaagaaaattcaggaattaaaagccgccttccagaccagcgaagtcgcggaaaaagcgaaggaagtctacaaaggcgacgcgatcaaaggctggtaagcctgaaccggcgccgtccctgccgacggcgccgcgctacccccgcccccgcgaacgcagcagcaaccagataaagaccggcgcgcccagggtcgccgtcaccacgccaatcggcagctctgcggcggaaagcgccagccgggcaatgatatccgcccccagcaaggcgcttgccccggccatcatacaggccgggagcaacacccggtgatcgctcaagccgcatagccgcagaatatgcgggatcaccagaccgataaagccaatcgcccccgccagcgccacgctaacgccgaccatccagccggtcgccaccaccagtaatttgcgccacagccacagcggcagcccaagctgacgagcggagacttcgcccagcgccagtaaattcaggggttgcgactgcagacagacccagcagagcaccggcaggagggctatcatcagccacagctgttgccagtcgacgccgccaaacccgcccatcatccagtacattagctgacgcaggtcaaaagaggtggagaagtagactgcccaggtcatcagggcgctgcagatgatccccagcgccacccccgccagcagcagacggctggtagacagatggcggcgggcaaaacgcagcagaataaaagtgatcagcagcgcgccaaagatggcacacaggccgagcgcccagccgggcaagactcctttgcccagcaggacggcggcaatcagcccgacgcccgcgccgttggagatccccagcagacccggctccgccagcggattttcaaacagcgcctgcattatcgccccggagagcgccagcgccgcccccaccagcagcaccgccagggttcgcggcaggcggatctgccagataaacagctggcctttggcgctgagccactcgccgggcgggatccattgctcccccgcgcacaggctgatcagcagggtgaccagcagcaacagcgttaatccgaagagccaacgccggctgcggcgctgttgaagatgggcgagagtcagcatagattccattacgcagggggaacaagaggctgattttacggtggctgtcgcggtgagaaaaggaaaacctcacgaccaaacgtcgacgcgaaggaaaatctcctccgcgtctgcggtcgttcgtcacaccagaatctgaaacagcagcgcaaagagaatgatattcgccaccacgattgcccagccgttatagagcatatatttcagatgagtagactgcgccagccccatctggccgaacatatctgatgagggaaacggcccgaaccagtccacctgggatgaggccagcagcacggcggtggtcccctggggcggcacgccggcggccatcagcatcgggccaaagattttatgagtaaaggtcatctgggccaccgccgcaccgggcacatggccgataatattgaacgcgaagatgctaaagcacagccaggccggggagatcccctccagcagcggttgagtatactccagcagcccctgataggcgtgcaggccatccatcagctcaaggatcgggttgtacagccagtagagaataaacatccacaccaggcggccgcagccgtgatacagggcctgaaggatctgcgtcggtcgcaggccgcctaccaggccggtcatcagggccaccagcagcatcacgattatcgcgaagctgaagccggctttaatcaccacgccaacgatcgccatcacgatgatggtcgccgcgaaggccagcgcgcttaatttacgccgacgctgctgcgcggcgctgagatcctcttgcggcttttccgcgagatcgacgtcatagcgcagtttgccttcggtcatcttctggatccgtcccgccattacccagccggccagcagcgtgaccgcgctcatcggcagaccaacgtacagcagataatccgggtagctcaacccaccgaggctgaggatcgtcacggtactgggggtgaaaggcccggtaaacagcccaacggaaccggcggtcatcatcagcgcggcgaccgttggcggggttaagcgtaccgctgccgccaccggaatgattactgccacgataatggcattgccaccggccatagtgcccagcgaaccgcaaattaaaatcgatgacgccacaatgccgaatttcacccgcgtctgactcgacaacccgatgcgatggacgacaaattttaccagctcaaccgctgcgccggtgcgggtggccacttcccccacgccggcgccgagcataatgataagcccaacggtggcaataaatgacccggtggatttcgccagcatcgtgcccatttccggcaggccggtcgaggtcattatcatggcgataataatcgaggagatgaccgccagcacaatatcaacgccgatcagcgataatatcgctagcgccaccagcggcgtaaattccagcagaccaagctcgctgcctggtcgaccgtggcaccacagcgcgatcaacacgaacagcagcaataacagaccaataataacgtttttccgcgtgatatttcgtctgacaggcgcattgcctgtgagcgttgagtcactcataacactccttaatgccaatcaatccgaccatgatggtcaggtggtgtatgggggcctgctcagaaaatatcctccctctttttcattattgattggccgcggcctgagggtttgtttgggtacaaaggaaacgattctgagagcgtaatatgccgccattgggcggggtctacagcacaagatgtaaccaatgcgctgattggtgattaaatctatgttaacttagtgttagtagaaaatgactttttatcggtaggctataaccctgagttaactgttcatgaaactgcgtcatctggaaatcttctatgccgtcatgacctgcggctctttatcgcgagcggcggaagcgctcaatatctcccagcccgcggccagcaaagcgttaaaaagcgccgaaatgaagctgggttttaccctgtttcagcgggtgcgcggcaagctgctgccgaccagcgaggcgatcacacttttcgaaaaagcgcagagcatttatcaggacctggacaacctgcgcctgctggccgacaacctggctcgcgatccgcgcgccaagatcactttaggctgtctgccaagcctggggttaagcctggtgccggagctggtgaccgacttttatcagcaaaacagcaacctggtgatgacgctcactaccgagcacaccgagacgctggtcaaaaaactggatttgcgcgagatagatttggcgctgacgctacagccggtgcagcagggagagatcctgaccaccctgattgccgaagtaccgctggtgtacatcgaccgtcattatcgtcagggggcggtggagatcgaccagatcgaccagcagcgctggatctcgccgggaccgcactcgctctctgccgccatcgccacccgtcgcgacttttccaccacccggctaaacgtccagacctactatatggccaccgagttcgtgaagcgcggcatgggctgcagcatcactgatatcttttccgcccagcacaacctggccccggagatgatccatcccattacgccgccgatggcgattaacctctgtctgttacgccgggccgacgtttccctgagcccgatggcgcaaaagttcgtcgattttctctgccagcgtctgcgccagcagctcaaggagattaacctgcggttataccctgaccataaaaagtcaattgcgccgctggggtaaatgctttgacataacccgataaatttatcagcggtggatatatcgggttatgaacaaacgcattgtcattatcggcggcggcgtggtcggtctggccacggcctgggaactgatcaagcgcggccatcaggtgcaattactggagcgcaatgccgaaccgggcagcgccaccagttttgccaacggcggacaattaagttaccgctacgtcgccccccttgccgacagcggcgttcctctgcagggaatgaaatggatgggcaaagccgattcgccgctgaatatgcgtctcaggatgtctctccagcagtggcgctggctgctgcagtttctgcgcgcctgtaataaccagaccaataaaatgaatggcgaccatattttacgcctgtcgctgctcagccgtcaggtcatgcaggcgtggcgggatgaggataatcttgccgatttccactggcggcgcagcggaaaattaattatccatcgtcgcgaatatgattttaataaagcagcaaaagggattgatcctcagtatcagcaggcgctgaatgctgaagcctgcctgcagctggagccggcgctcaaacatattagtccttctctgcagggcggaatctattcgccaggcgatgaaacggcagattgtcatcagttctgccttgccctgctcgacaagctcaatgccagcagcgactttagcctgctgacccagtgtgaggtgcggcgactccataagcgcgggggacgcatcagcagcctggagaccagtcaggggaccctcaccggcgatgagtatgtcgtcgccgccggtaacggcagtggttctctgcttgggcatctgggggttcgcgtgccgctgtgcgccctgaaggggtacagcctgaccctgccctatcctgaaaaagcaggtattgcccctgacatcagcgtcaccgactacgggcacaaaatcgtttatgcccgccttggccaacagctgcgcatcgcggcgatggtggacatcggctacgacggcgacgaactgcgcgaatgccgcattcaggcgctgaagaacatcgtcgcccgcagctttcctgaactggaggggctggacgaggccgaagtctggaccggcatgcgcccgtcaacgccagccggcccgccgatgctggggcgtgccggctaccccaacctgtggatgaacctcggccagggtagcctcggctttactctcgccgccggcagcgcggtggtgctgggcgcgttaatcgacaatcagatgccagacatttctttagaaggtctcacatggaaacaaaccgcatgacaattattcgtaataatccacaacctcgtcttgccgccagcgttgcgtatggcgatctgctgttcctctccgggcagacgccaaaaagcaatgaagacgatatcgttttacaaacccgtgaagtactggagaagatcgacgcgctgctggccgcggccgggagcgataagcagcacgttctctccgcgcagatctggttgaaaaatatcgagcgtgactttgccgcattcaatgaggtgtgggtgcaatggatgccggaaggctatagcccagcgcgagcggccgtgcaggcggagatggcgcgaccagaaatcctggtggagatcatgctcaccgccgtcaaagcgtaaagattaacagaaaagaaaaaggccgcaatgcggcctttttaattagttcagattatttgtctttcggcgacgcgttttcgacacggcttttcagcttctgaccgggtctgaaggtcaccacgcgccgggctgtaatgggaatatcctcccccgtcttcgggttacgtcccgggcgttggtttttatcccgcaaatcgaagttgccgaacccggagagtttgacctgttctccgttttccagagcacgacggatctcttcgaaaaacaactcgaccagttctttggcatcccgcttgctaagcccaagcttatcaaacagatattctgacatttcagcttttgtaagcgccataggttcaatccctcaatgatgcctggaatcgctcttttaatgcctctacacatctggcaacggtagcggcaatctcctcttcttcgagtgtacggctggtatcctgcaggatcaggctaatcgcaaggctcttatacccttccgccacacccttaccacggtacacgtcaaataagtttacgccaactacctgatttacgccaactttcttacattcggctaaaacatcggcggcagccacgttttccgcgaccagcaccgcgatgtcgcgacggttcgccgggaagcgggaaatatcgcgcgcctgaggcaccacgcggtctgcgagcttgttccactccagttcgaacaccagagtgcgaccgttcagatccagtttacgttccagctcaggatgaacaaccccaatgaaaccaatgcgttcacctttaagataaatcgctgcggattgtcccggatgcagcgcggtggtcgcttcagcacggaattcgatatccgctaattttccggttaaatccagaacggcttccagatcgcctttcagatcatagaaatcgaccgtctctttcgccagtgtccagtgctcttcgtagcggttgccgcagatcgccccggccagcatcacatcctgacgaatgcccagcggcgcattggtgtccggcacaaagcgcaggccgctctcaaagatgcgcacccggctctgctgacggttctggttgtagaccacggtgcccagcaggccggtccacagcgacaggcgcatcgccgacatttcgctggagatcgggcttggcaggatcagcgcctcttccccggcgtggatcagctgctggactttcgggtcgacgaagctgtaggtgatcacttcctgatagcctttgtcgttcagcagcgttttcacgcgcttcagcgacaggtccgcttcgcgatgggttcccatgatcagacccgcctgcaccggctcgtcaggaatgttgttgtagccgtaaacgcgagccacttcttcaaccagatcttcttcgatctccatgtcgaaacgccagctcggcgcaaccgcctgccattcgccctcgccaaccgtcacttcgcagccgaggcgctgcagaatgtcggtgacctgcgcgtcgtcgatatggtggccaatcaggcgatccagcttgctgcgacgcagcgtaatggtggcgcgtgttggtagattctctttgctggtaacgtcaatgaccgggccggcttcaccgccgcagaggtcgatcagcagacgggtggcacgctccagcgctttatactgcagggccggatcgacgccgcgctcatagcggtgagaggcatcggtgtgcaggccatgacggcgcgcgcggccggtaatggacagcgggctgaagaacgcgcattccagcagcacgttttgtgtttcgtcgttaacgccggagtgttccccgccgaagatcccccccatcgccagcgctttgttatggtctgcaatgaccagcgtgtcgctgtcgagctttgcttcagagccatcgagcaggaccagggtttccccttctttcgccatgcgcaccacgatcccgccttcaatacggtcgcggtcaaaggcgtgcatcggctggcccagctcaagcagcacatagttggtcacgtcaaccaccgcgtcgatggagcggatcccgcagcggcgcagcttctctttcatccacagcggcgtcggcgctttgacgttgatacctttcaccacgcgccccagatagcgcgggcaagcctgcggcgcgtcaacctgaatcggcagcacgtcgtcaatcgtcgcggcaaccggcgtgatttccggcgcgttcagcggcgctttgttcaggacagcgacatcgcgcgccacgccaatgatgcccaggcaatcggcgcggtttggcgtgacgctgatttcgatggtgttatcgtcaagcttgaggtattcgcgaatatcggtgccgatgggcgcatctgccggcagctcgatgataccgctatggtcgtcggaaatacccagctcggagaaggagcacagcatcccctcagacggctcgccgcgcagcttcgcggccttaattttgaaatcgcccggcagcacggcgccgatggtggctaccgcgacctttagcccctgacggcagtttggcgcgccgcagacgatgtccagcaggcgttcgccgccgacgttgactttggtgacgcgcagtttgtcggcgttcgggtgctgaccgcactccaccacttccccgactacgacgccgttgaagctgccggcgaccggctcaacgccatctacttcgaggcccgccatggtgatctgatcggaaagcgcttcgctgtcgatcgccgggttaacccattcgcgtaaccacagttcactgaatttcattgttctgtcctgcccttatttaaactgtttgaggaaacgcagatcgttttcgaagaacgcgcgcagatcggtgacgccatagcgcagcatggtcagacgctccatgcccatgccgaaggcgaagccggagtagacttccggatcgatacccacgttacgcagcacgttcgggtgcaccatcccgcagcccagcacttccagccatttgccgtttttacccattacgtcaacttccgcagacggttcggtgaacgggaagtaggacggacggaagcggacctgcagatcttcttcaaagaagttgttcaggaagtcgtgcagcgtccctttcaggttggtgaagctgatatttttatcaacgatcagaccttccatctgatggaacatcggggtgtgggtctgatcgtagtcgttacgatagacgcggcccggcgcgataatacggataggcggctgctggttttccatggtgcggatctgcacgccggaggtctgcgtacgcagcaggcgagtggcatcgaaccagaaagtgtcgtggtcagcgcgcgccggatggtgacccggaatattcagcgcatcgaagttgtggtaatcgtcttcgatttccgggcccgtcgccacggtaaagccgagctcaccgaagaaactttcaatacggtcgatggtgcgagtaaccggatgcaggccgccgttttcaatgcggcgacccggcagcgagacgtcaatggtctctgcggccagacgcgcattcagcgctgcgccttccagttcagctttacgcgcgttcagcgcctgctgcacctgctctttcgcctcgttgatgaccgcaccggctgccggacgctcttccggcggcagctcacgcagggtggtcatttgcagggtcagatgcccttttttacccaggtattccacgcggacgttgtccagcgcagcaacatctgatgcctcgttaatggctgccttggcactggcaaccagctctgcgagatgtgacatggttttcctcattatgtcggtgcagacaccggttatagtgaaattaatattccgaatccatatacgaaaaaagcctccacaggggaggctttctggcgctgttttccgtttcttctttcacgcgcaagccccctgagttcaggtgctaaagtaaaaaaagaagcggaaaatagcagcattcatgcttgcattaccttgtctggtaagaaacgtcagagctgtattgaaaagcctgcgccgataaaagtcaatgtattgatggtgttgaaacgaaaagagggagacaagctccctctttcaactggcttatgccagagctgctttcgctttttcgaccagagcggtgaacgctactttgtcgaatacagcgatgtcagccaggatcttacggtcgatttcaacagaggcttttttcaggccattgatgaatttgctgtaagaaataccgttctgacgtgctgctgcgttgatacgtgcaatccacagttgacggaactgacgtttacgttgacgacggtcacggtaagcgtactgaccagctttgataacagcctggaaggcaacgcggtatacgcgagaacgcgcaccgtagtagcctttagcttgtttcaaaattttcttgtgacgtgcacgtgcaattacaccacgttttacgcgagccatgtgtgctctcctgtatctattctaagttaaaaaagttaaacgttaacgacttatgcgtacggcaggcacgcgataaccaggcccagatcgcctttggaaaccatggctttcggacgcaggtgacgtttacgcttggtagcttttttagtcagaatgtgacgcaggttagcgtgcttgtgcttaaaaccacctttaccggtttttttgaagcgcttagcagcaccgcgtacggtcttaatttttggcattttaataacttccacttcgcattgttaataaacgaaacaaaggcgaacaaaaccagtgagccgaagcccaccggaaatgtttcttgatggccttactgtttcttcttaggagcgagcaccatgatcatctggcggccttcgatcttcgttgggaaggattcgactactgccagttcaaccagatcgtctttcacgcggttaagcacttccataccgatctgctggtgggccatctcacgaccgcggaaacgcagcgtgatcttggccttatcgccatcttcgagaaagcgaatcaggctgcggagttttacctgatagtcaccttcatcagtaccagggcggaatttaatttccttaacctggataactttctgcttcttcttctgttccttagaagacttactcttttcataaaggaacttgccgtagtccatgatacgacaaactggcggctcggcgttagggctgatttcaactaaatctactccagcctcttcagccttttcgatagcttctctcagactcacaattcccagctgctcaccttccagacctgttaagcgaacttcctgggcgcgaatctcgccattaatacgattcggacgtgccgtttgaactcgttttccgcctttaataccttattcctccagttgttgaagactgcggctgcgaatctcttgttgcagcttctcgatcacttcatttacgtccatgctgccgaggtctttcccgcgacgggtgcgcacggccactttgccggcttcgacttctttgtcgccacagaccaacatatacgggacacgacgtaaagtgtgctcgcggattttaaagccaatcttctcatttctcaagtctgcttttacacgaatgcccgcattttgtagtttacgcgtcaattcgttaacgtattcagcctgagaatcggtaatattcatgaccactacctgcactggtgcaatccaggttgggaagaagcctgcgaactcttcggtcaggatgccaatgaagcgctccagagaaccgagaatcgcacggtgaatcatgaccggcacctgacgctcgttgttttcacccacataggaggcgcttaaacgctgcggcagagagaagtccagctgtacggtaccgcactgccatgcacgatcgaggcagtcatacagggtaaattcaattttcgggccgtagaacgccccttcacccagttgatattcaaatgggatgttattttcttccagcgccaccgccagatccgcttccgcgcgatcccaggtctcgtcgctaccgatacgtttttccgggcgagtcgacagtttgacgacgatcttctcgaagccaaaggtgctatacatatcgtagaccatacgaatacaggcgttcacttcatcgcgaacctgatcttcagtacagaagatatgcgcatcatcctgggtaaagccgcgcacgcgcatcagaccatgcagcgcgccagacggttcgttacggtggcagctaccgaattccgccatacgcagcggcaggtcgcggtaggatttcagcccctggttgaagatctgcacgtgacccgggcagttcatcggcttgatacagtattcacggttctcagaagaggtggtgaacatcgcatctttgtagttgtcccagtggccggttttttcccacagcacacggtccatcatgaacggaccttttacttcctgatactggtactctttcagtttagaacgaacaaacgtttccagttcacggaagatggtccagccgtcattgtgccagaacaccatccccggcgcctcttcctgcatgtgatacaggtcgagctgcttaccgattttacggtggtcacgcttggcggcttcttccagacgctgcaggtaggcattcagcgcttttttatctgcccacgcggtgccgtagatacgctgcaacattttattgttgctgtcgccgcgccagtaggctccggcggttttcatcagcttaaagtgatggcagaagcgcatgttcggtacgtgcggaccgcggcacatatcgatatattcttcatgatgatacaggccaggcttgtcatcatgggcaatgttttcatcaagaatagaaactttatagctttcgccgcgtttcacgaaggtttcacgcgcttcatgccagctcactttcttcttgataacgtcgtagtttttctcggcgagctcatgcatacgtttttcgagcgcgtcgatatcttcctgggtcagggtgtggtcgaggtctacgtcatagtagaaaccattatcgacaaccggaccgatagccattttggtgttgggccatagctgtttgatggcatggcctaacaggtgcgcgcaggagtgacgaatgatctccagcccttcttcatctttcgcggtgatgatagagagagtggaatcggattcgatcgggtcacaggcgtctaccagttcaccgtttacccgcccggcaatggtggctttcgccaggcctggaccgatatccagcgcgacatccatcggactaactgcgtggtcaaaatggcgttggctgccatcaggaagcgtaattacaggcattttatgtccttatttgcagtggtgccccgcacgaaagagcacatacaaaactatataatcataattatcatcaggttaaggcgcagttcccgcttcactctgcgaaaataggagcacgaccggaacgatcgctcccccctgcagccgcctgctgataacaccggggagtagtttacacatcattggtacgtgattaaagccgcgacagcataaatgatggcggaatgcggagaaaacaagagggccacggataaaaaagcagaatataagcgatgtggcgcggtaatattggccaatggcgccggacgatattattcggacatgataaaagagaggtagagatattacctgctgaatgtataccgcgggccattaaaccggtaccacttaacccggcttattagaccgctcgcgaaacgatagcctgcaatattaagaccactcgccggccatcagcgtatgcacattaaaggcgtcgttcatggattttccggtggtaggggcgccgggcgcaatattcgaaccagcctcaacgtcagtggctttggcgatacctacctgggtatgatcctgatgacccgatggcggaacgggcgtggcggctgatgcgccaaaagaaagcacgcacagcgccagggctgcgatggtataacgattgtttttcatgatgttaattctcttattacggaaatcagaccgggcaatgtcgccctccggtcagtgcttgttagtatagatccagatcacatatttgtccgtcgaatatttagctatttgtgtcaaatagaatgaatatttgtcaggcgctcgtgaataatggagaaaaaatggagggctatttcctttttacaaaaagtaaaacgaacggccagaaaaaataatatcactaattgctaaaaccaaaacgaacaggccggggaaaacccggcctgaaatattacatcttatacccgagggagagcgaggtccggcgatcggtatgctccggcgcggacgcaggcggctcagagttccaggtcacgttgtaggcgaccttcagggcgaaatgggcgttaatcgccacgtttaacgcgctctctgagttgaccgtggtgtcctcggcgccgaacaccgataccccttgcgaaaatttggcgttatcggtcatctgccaggcccatgtacccgaagcataacccagcggctgggtatcagtatccccgtcggtatattcgtcataacgaacgccaggaccgaattcaaaccgcagactgtgcaccggcccgttgaggatctgacgaccatagcccgccgtcacaacatcgcgctgttgatagccgttgtagcggtcagttagccagctaccctgaccaaaaacatagttcatatcggtcaggttgtagcggctacgtccgccgacagcatatttttctgaggatcgctcatcattggacgacgtgttgctggcgttgccccacagcgaccaggcggtggtattaccataccaggtcagggtggaatccgccgtcatcgaagagctcttggtgttgccggactgcgccaggtagcctgcgttaaccaccccttcgaacggttttttggcagcggaagggtcatccatgacggtaaatacagaatcatcggccattgcgccaacagacgcaaaaagcccccccgccagcataaccgctgcgggtactgtctttaaaagcttcattataactctctaaaatacattttttaggacagtacaaatgatgaacaggcataatctcgccggctcattgaatttagcgtccgtacaacataaaagagacctgagggtcccggaaactttcgcgaggatcgcggagtgcaggtcctaagaaaggtagcaaattataaaaaagcacgaataacatagcaatcacttactctttcgttttttgaataagacagctccggaaacaatctttatttcataatgaaaatagaggcatctttgcaaaactgtcaggaactggactttccctccccgagtcatcgtgccatgcttaaattaacgacagtcgccgtattaaggaggagaaggaatgaccaaaatttacacgctcacgctggccccctcgctggatagcgccacgcaaaccccacagatctacccggaaggcaaacttcgctgcagcgcgccggtatttgaacctggcggcggcgggatcaatgtggcccgcgccgtgacctttctcggcggcaaagccaccgccattttcccggtcggtggcgctaccggcgagcatcttgccgccctgctggccgatgagcaggtgccggtcgagaccgtcgaaacccgcgactggacgcggcaaaacctgcacgtccacgtggccgccagcggcgaacagtatcgcttcgttatgcccggcgcggcactgacggacgatgaattccgccgtctggaagagaaggttctgactatcgaacccggctctctgctggtggtcagcggcagcctgccgccaggtattagcgtcgataacctgatgcagctggtgaaaaatgcgcaacagcagggactgcgctgcatcattgacagttccggcgatgcgctggccgccgcgctggacgtcggcaatattgagctggtgaaaccgaaccagaaagagcttagcgccctcgtgcagcgcgatctcagccaacccgatgacgtgcgccttgccgctcagtcgttgatccagtccggtaaagtgcgccgggtggtggtctccctgggtccgcagggggcgttaggcgtggacgccagcggcagcgttcaggttgtgccgccaccgatgaaaagccagagcaccgtcggcgctggcgacagcatggtgggcgccatgaccttgcgtctggcggaaaacgccagccttgaagacatggtacgctttggcgtcgccgccggtagcgccgcgaccatcaaccagggcacccgcctctgctcgcgggccaatacgcaaaaaatctatgattatctctgcgggcgttgatcttccctgccccctccgcgcaggcggaggggaatcacaatataagcaggatggtctatgctggaaaggccatgcataacaacggggtgtagagatgagtaatgagattaccgcctgggtcgtcagcgtgaccttccatgaacaggcgctgacggagatcaatgaggtcagcaaccattttacccgtgccgggtttgtactgacgctcaatgatgaagagggcacgccccatgagctgggtaccaacaccttcggcctgctgagcggccagacggccgaggaagttaaggccctcagcgctggcctggcggaagcggcccttggccgcccggcggaaatcgctgtggccacattcaccgagtggttaaaagctcaataagtgcgtttagcgcaacggaaagcgtcagttgtgcgtcagttccaggtttacccggtagtaatgcgctaaccttatgatatggtggaaaacatggggagagacagcatgtggcaagcaatcagtactcttttacgcgattggcataccgaagacgctgaaatcgaactgaaaaccgagctgcccggtggagagattcattccgcctggcatttacgcttcggcgggaaagattacttcgtgaaatgcgacgaacgggaacttctgcctatcttcaccgccgagtccgatcagctggagctgctgtcgcgaagcaaaaccgttcgcgtaccgcaggtctttgccgtcggcagcgatcgcgactatagcttcgtggtcatggagtacctccctccccgtccgctggatgcgcacaatgcgtttctgcttggccagcagctagcccacctccatcagtggagcgatcagccgcagttcggtctggattttgataacgatctttccaccacgccgcagcccaacgcctggcagcgtcgctggtcggttttttttgccgagcagcgtatcggctggcagctggagctcgcggcggagaagggattgcactttggcgatatcgataccttagtcgatatggtacagcagcgactggccaaccatcagccgcagccttcgctgctgcacggggatctgtggtccggcaactgcgccttagggccggatggcccctatatattcgatcccgcctgctactggggcgaccgcgagtgcgatttagccatgctgccgatgcatccggaacagcccccgcaaatctatgacggctatcagtccgtttcgcctctgccgtcgggttttctcgatcgtcaaccgatttatcagctttatactctgctgaacagagcgattttgtttggcggccagcacctggtaacggcccagcaggcgctggatgatgtattgatggagaaaatgcgttaaacaagcttcacggcggaccttgcaggtccgccgcagcgttttatcagttaatctcgacgccgttcaggcggaatttgatggtcatcgttacgccggtacccggtcttccctgctcataacgccatctgcgcatcgcgcttttcacctcgcgttcgaacatattcgccggctgagcagagaggatctgcagattatcaatgcggccatcaggcgaaacgtcaaacttcacccgtaccgtcccttcaatgcgcagcgcctgagcgcgcggcggataggacggctgaacgcggctgatcgcccgcgggccgctcggagcagtaacggtgggtttagccgctgcggtcgaggtacttggcgctgtacgcgccggcgccgtattgttgttttcaaacggcgaggccggacgcggctctgctgccggcttcacttcccgcttcggctgttcaacctttttctccggcttaggcttgggtttaggtttgggcttcggcttaggttccggtttatggatcaccaccggcgcctctttcggcggttcaggcactacctctggctccggctcaggttcgggttcaacaacgggctccacgacaggctgcgccgccggaggcggctcaagatcggccggcgccaccattgtgatctctatcggctgcgtcggagaaggctgttcaataacctgatgtaccgaggtataaagcagccccgccacaacggcaccgtggatagccacggacagcagcgttggccacggaaagcggcgaggtaaatcaagggtcattgcgctcatagtcgtttctgttgaaaaatgatgctccgattttaaatgcaaatagcaatcatattcaataaggcgtcttaacctgagtcaatttttgccgccatttgcagaaaaaagctgcgtcggcagtgctttccactccagagcgcatctttgcattgcagtccatcgctgtttaacttaacgtaattcgcctgattattgataaggagctttgccgtgctttacgttatctacgctgaagatatcgccgattctctggaaaagcggctgtcggttcgccccgcgcatctcgcgcgtttacaactcttacacgatgaaggccgactgcttaccgccgggccaatgccggccgttgacagtaacgaaccgggcgcagcaggattcagcggctcaacggtgattgccgagtttgaatcgctggaagcggcccaggcctgggctaatgacgatccgtatatcgccgccggggtttaccgccaggtctctgttaagccatacaaaaaggttttttgaaaataccctttcctttttctggctaaccacaaaaacacccaggtcatcagaatgaagggcgcattttggtacacaacattgaaatgtcgccctttttaacctcgcgaaagcgttgactgttatacgcctgagaagcctggaagatgagcacgcaccttctcctgctaccccatcatcgaccatcgcctcgcttttttcggcaatagaaaatgctgacaaaacatcgacgccgcgcgtgatagtgaattactaataccttgtgtaaggctgttagggaggatcgcgttgttatttagcgcttgcatttaatgtcagcacatcctgatatagccctataaatctacagtgcaatagaaagaaaaaaataactgaaagatagttgcttaacgacagatatgaaagcctgaaaaaaaatattattgggcatccactgcggatgccgcggaaccgaacgtagcccatcttgctatattcaggaccgtagccgcttgaaagcacatggaaataacacccctgtagacaaaggtttacctggcaggcataaaggggtattaactacgctgccagcgttaagttgctgagcatcatttttaaagcctattaatttcgttgcgtaaacttcacgcagagtgatagtaggggcatcactgcttgattaaaaaatttgaaagggaataacaaatgttttcaataagccctgtatttttttgggctaacatttatgtacctgccgattttgaggattattgtgtgaataccctgaaaaaaaccgcattgctttctgtacttgccttatatattcctgtgtcgcaagccgcggctaaggaatacagtcttgatccacagcatacctcggttgtgatctcctggaaccatttcggcttctcaaaccctaccgcctatatctctgatgtttcagggaaactggcctttgataaagagaatccggagaaatcctcggtgaacgtcacgctgccagtgaaaaccattgacgctcacgtcaaggcgttaacggatgagtttttaggcaaagagtattttgatgttaaaacgtttcccgacgccactttccagagtaccaaagtggaaagcaaaggcgacaataaatatgatgtggaaggtaatttgaccattaaaggcatcaccaaaccggtggtcctgcatgccgtcctgaataagcaggatatgcacccaatggtgaaaaaagaggccattggatttgatgccaccggggtgataaaacgttcagactttaagcttgataaatatgtgccggcggtaagtgataacgtcaccatcacgttatccacggaagcctatgcaaaataagtaaaagctggcgcaacgattgcgttttattcaggatgcttattgcatggcctctctggataatataacaggctcagattattcatggtcaggatcggtcggttcattgagcttcaacgcgctggaccgcttaataacccccttgcctgtctgagtctgttttctcattccctcagttcccgcctggttaccgcagctggccggtcatatcattaagcatttaacaacgccatgcccttcctgagcggcaataaatgctatctgacggttaattcctgtcgcgccgcaaacgacctggctctggatcttgtcgtccgtcattacaagccaggcgtagcatctctctttcactgaggcgggagctctgttttgtcgtcgcatagcagcatgaaaaaccatcattgccctatggcgatgtgcaacgggaatttagcgcagagagaaaacgacaacggcaccgcgtacggtgccgtttgcctgctcgcttagctgtcagggaagataaacagcagggcatgacgctgccgtttcaccagtcccttcctgatagcgaggatccgcatattgcggcgcgattgggcttccagccagcgcgctttacggcgattcacctgtctcagcatgcgccagcgccctacttccgttctactacgcttcattgcaacgactctacgagtgaaaacagcccccattataaacctctgccagcaactgactaccgctttcgctgcgtttttatttgccagaaaaatactgatgcgtaaactcatcacatatcgtcattcaaaaggattttacatctatgacaaccttttacacggtggtgaactggctggtcattctggggtactggctgttgatcgccggtgtaacattacgaattctaatgaaacgccgcgctgtcccgtccgccatggcatggttgctgatcatttatatcctgccgctggtggggattatcgcctatctctcctttggcgagctgcatctcggcaagcgtcgggccgagcgcgccagggcgatgtggccctcgacggccaagtggctaaacgacctcaaagcctgcaaacatatcttcgcggaagataacagcccggtggccgaatccctgttcaagctgtgcgaacggcgtcagggcattggcggcgtaaaaggcaaccagctacagctgctgacggaatctgacgacgtgatgcaggccctgatccgcgatattcagctggcccgtcacaacatagagatggtcttttatatctggcagcccggcggcatggccgacagcgtcgctgaatcgctgatggccgccgctcgccgcggggttcactgtcggctaatgctcgactccgcgggcagcgtggcctttttccgcagcccatgggcggcgatgatgcgtaacgccggaattgaagtcgtcgaagctcttaaggttaacctgatgcgcgtattcctgcgccggatggacctgcgtcagcatcgtaaaatggtgatgatcgataactatatcgcctacaccggcagcatgaatatggtcgatccgcgctactttaaacaggactcaggagtcggacagtggattgatctaatggcgcgaatggaaggcccggtggcgacctcgatgggcatcgtctactcctgcgactgggaaatagagaccggcaagcgcattctgccgccgccgccggacgtcaatatcatgccgttcgaagaggccagcggacatactattcacacgatcgcctccggaccgggctttccggaagatctgattcatcaggctctcctcaccgccgcctatgcggcgaaagagcatctgatcatgaccaccccctacttcgtacccagcgacgacctgctgcatgcgatctgtaccgccgcccagcgcggcgttgacgtgagcattattttaccgcgcaagaacgattcgctgctggtaggctgggccagccgggccttcttcaccgagctgctggcggccggggtcaaaatctatcagtttgagggcggactgttgcataccaagagcgtgctggtcgatggcgagctaagtctggtggggaccgtcaacctggatatgcgcagcctgtggctcaacttcgagattaccctggtcatcgatgacgccggtttcggcagcgatctggcggcggttcaggatgattatatctcgcgctcgcgcctgctggatgcccgtctctggttaaaacgtccgctgtggcagcggatcgccgagcgactgttttacttcttcagcccgttgctgtaaaacgtgcccatcagataccgaatgagtagcaatcatggatatggatttaaacaaccgcctgaccgaagacgaaacgctcgagcaggcttacgatatcttcctcgaactggcggccgacaatctcgacccggcggacatcattctgtttaacctgcagtttgaggagcgcggcggcgccgaactgttcgacccttcggcagactgggaagagcatgtggattacgatctcaacccggatttcttcgccgaagtggtgattggtctggcggataccgacggcggggaaatcaatgatatcttcgcccgcgttctgctgtgccgcgagaaagatcataagctgtgccatattctgtggcgtgaataacctttaacatccagtaaaaagcctgccgcggttctcccggcaggcttttttatgtcgccagcttacttcggcaaggcatgaccgcaggcatggcagaaacgggcgttatcgtcatggtcgccctgctgacactgcggacacaggcgctgctgtcgtcgacgattcagggcgctggtcatatgtgtggtgataagtccggtcggtatggcaataatggagtagccgatcaggataagaatggaggccaggatgcgacccaacggcgtgtgcggcgtgatgtctccgtagccgacggtggtgatggtcacgatggcccaatagaccgaggcgttaagcgtggtaaagccgtattccggcccctcaatcagatacattaacgagccgaaaatcaccatcacaatggcgataaacgaataaaacaggatcagctgatggcgcgcgctgacaatcgctcgccagaatacgttgagcgaaggcataaagcgcagtagtttgagaatacgcagcgcgcggatcgcccgcattgcccgccaggcgaatacataattgaggctaatttccggccatagccacatcacatacagcggtaaaatcgtcgccaggtcaatcagcccccaaaagctgaaaatatagtggagcggattgggccaggtagcgatacgcagcaggtattccagggtaaagaccgcggtcaccagcagctccagccagacgaaaatatgccattcatctaatgtcaggtgatattgcgtgcccagtcccgactcgataaatatcaccagtacgctgagcagggcgaaaagtccgcacagcccttcaaagcggcggccggaacgtcggttctgatcgaaaagtaaatgataaagccgcagacgagcggcagaaagcatacccacttcgttaacctcgcaaaaaaaaagggctgacctgcgtcagcccctgagattataacgggtctaccttaaggcaggaaaccgcatggcggaaactgccttccagcaccgggcgggttttggcgcactccggtccggcaagcggacagcgggtgcggaatacgcagcctgagggcggattaatcggcgagggtaattcgccttccagcagttggatagttttcgttttctcgagatcaggatcggggatcggcaccgccgacatcagcgctttggtatagggatgcagcggattatggtacacctcgtcgtaggtccccagctccaccgcatggcccagatacattaccagaacccgatcggagatatgcttaaccaccgccagatcgtgagcgataaatatcagcgatagccccatctcacgctgcagttgctgcagcaggttgacgacctgcgcctgaatcgacacgtcaagcgcggagaccggctcatcgcagataatcagctttggctcaaggatcagcgcccgcgcgatgccgatacgctgacactgaccgccggagaactcgtgcggatagcggttgatcaggttgggcagcaacccaactttcatcatcatcgctttgacgcgatcgcgcacttcctgacggggcatcttcggatgataggtacgcagcggttcggcgataatttctccgatggtcatgcgcgggttcagcgaggccagcggatcctggaagatcatctggatatcgctgcgcacgtcgcgccactcttcctgcttcatgcccagcagatctttacccagccaggccactttgccatcggtcgctttcaccagaccaataatggcgcgggcgaaggtcgatttgccgcagcccgactcccctaccacaccgagggtttcaccctcgtaaaggcgcagcgtcacgccatccaccgctttcagcgttttcgacggctgccagaaccactgcttgccatctttgatatcgaagtgcaccttcaggtcggcaatttcgagcaggacttttcgttgttcagttacggcgttcatagcagatcccccaccggtttaaagcaggcgcgcaggcggcctggcgcgaacgattccagcggcggcgcgctgctgcactgctccatggcatgcgggcagcgcggctggaatggacagcctttcggcaatcgcagcaggttcggtgggttgccgggaatggtcaacaacgcatcgccttccgcatccagacgtggaaccgcattcaacagcccaatagagtatgggtgcgacggttgatagaagacatcgcgcgcctgaccgtactccatggtgcgcccggcgtacatcaccagcactttatcgcagatccctgccaccaccccaaggtcgtgggtgatcatgataatggccgtgttgaattcgcgtttaagctcattcaacagcgtcatgatctgcgcctgcacggtaacgtccagggcagtggtcggttcatccgcaatcagcagccggggccggcacagcagcgccatggcaatcatcacgcgctgacgcatgcccccggagaactcgtgcgggaacattttcatgcgcttacgcgcttccggcatttttaccgcgtcgagcatcttcaccgactcttcaaacgcttcggctttactcagccctttatgcagcatcaggacttccattaactgctcgcccacccgcatataggggttaagagaggtcatcggatcctggaaaatcattgagatttgttcagcgcgcagtttgttcagctcacgctcgggcaaattgaggatttgccgaccgttaaaggtggcggaacccccgatgcgaccgttggccgccagcagtcccatcagggcgaaggcggtttgcgatttaccggagccggattcgcccacaatgccgagcgtctcgcccgcctgcagggtgaagttcagatcattgacggcggtgacgtcgccatccggcgttttaaaggtgacgcgaagatctttcacgtccagcagtagtccgctgtggctctgcgcttgcggcgcttttgccgtttcaatcatggtcatggcagcgctccttagcggtctttcgggtcgagggcatcacgcagaccatcgccgataaagttgaaacagaacagggtcaccaccaggaaacccgccgggaacaacagtagccagggcgaaacttccattgagttggcgccatcgctgagcaatgccccccagctgctgagcggctcctgcgtccccagtcccaggaaactgaggaaggattcgaagaggatcatgctggggaccagcagcgaggcatacaccaccaccacccccagcacgttggggacgatatggcgcagcacgatgctcgccgtcgagaccccgccgacctgcgcggcttcgataaactctttgcgcttcaggctcagcgtctgcccgcgcacgatacgcgccatatccagccaggacaccatgccgatggcgacaaagatcagcaggatattctgaccaaaaaaggtcaccagcaggatgacgaagaacataaacgggaaggagttgaggatctccagcagacgcatcatcaccgaatccactttgccgccgagataaccggagagcgaaccgtacagcgtgccgaggatcaccgccaccagcgccgccgccaccccgaccatcagcgaaatgcgcccgccgatcgctacgcgcaccagcaggtcgcgcccggaggagtcggttccgaagtagtggccggaggccatatccggggcattggacatcatgccccagtcggtatcgaagtaggagaacgacgataccatcggcgcgaaggtaacgaacagcgcaattagcaccagcataatcaggctggtcaccgcggcgcggttatgcataaagcgacgacgcgcgtcctgccagaggctacgcccctccacttccagcttctcactgaagttttccagcgcctcgctatttttcttacttaacatcatggcgaactccggcttcagtagcgaatcttcggatcgataacggcgtacagcacgtcaacgatggcgttgaacaggatagtcagggcgccaacgaggatcgtcaggctgagcaccagagagtagtcgcggttaagcgccccgttaacgaacagctggccgatccccggcaggccgtaaatggtttcaatgaccattgagccggtgataatgcccacgaaagctggccccatataggagagcaccggcagcagcgccggcttcagcgcatggcgcagaataatgcgacgcatcggcagccccttcgcccgcgcggtgcggataaagttagagtgcagcacttcaatcattgagccgcgggtgatacgcgcgatgctggcgatataggccagggaaagcgccaccatcggcaggatcataaatttcagcgccccgccgttccagccgccgcccggcagccagtgcagggtaatggcaaagatcatcaccagcagcggcgcgaccacaaagctcggaataaccacgccggtcatggctacccccatcaccgcgtagtcccagcgggtattttgcttcagggcggctatcaccccggcggcaacgccgatcaccaccgccagtaaaaaggcggcgaagcccagtttcgctgaaaccgggaagctggcggccaccagatcgttgacggaataatctttgtatttaaaagagggaccaaaatcgccatgcgccagctgcttcagataattgaagtactgcgtcatgatagggtcgtttaaatggtattttgcttcaatattcgccatgacttccggcggtagcgtgcgttccccggtaaaaggacttcccggcgccagacgcatcatgaagaatgagatggtgataagaataaatagcgtcggaatcgcttccagacagcgacgtaagataaattttaacattgcccgtaccttctggcgtgtgcctttgcactgctctcaaataagacacgatggagcgagccgagacccgctccacgtattgccattaatgtttgataacgtagaggtctttggtatagacgttatccatcgggtctttaccggtatagccaccgacccacggtttcaccaggcgggcgttaacgtagtaatagaccggtacgatcgcgctgtctttgtccagctgctgctctgctttcgcataggccgccgtgcgctgcgcttcatcggatgcttttacggattcagccataatcttgtcgaacgccgggctcttatagtgcgcggtgttcattgaactgtcagagagcatggtgttcaggaaagaagttggctcgttatagtcggcgcaccagcccgcacgcgccacgtcataggtgccctgatgacgggtatcgaggaacgttttccactcctggttgaccagcttcacgtcaatgcccaggtttttacgccacagcgaggcggcggcaatcgccagtttcttgtgcaaatcagaggtgttatacagcaggttgaaggtcaacggtttatcggcgctatagccggcttcggccagcagtttcttcgcttcttcgttgcgtttttcctgcgaccaggtaaaccattccggctcgctcagcttcgcgccatcggtgtaaggcggcgtgtagccgtaggccggcagatcgccctgtcctttcaccttattagcaataatatcgcgatccaggcccagcttcagcgcggtacgcacgcgcacgtcggtgaacggggccttctggttgttgatttcgtaataataggtacacagataggggtcaacgtgcagctcgttggggatctcttttttcagcttctggaagagttcgatcggcagctggttataagtcatgtccagttcaccgctgcggtagcggttaacataggtcacttcggaagaggtcggcagccaggtaacggtgttaatgacggttttagcattatcccaatagtgcgggttacgctccatcacgatccgctcgttgaccacccagtctttcagagtatacgcgccgttggtaacgatattgccaggctgcgtccacttttcgccaaatttttcgatggccggtttgtagacgggagacatcgccgggttaaccagcagtttataaaaatagggtaccggttcgctgagggtgacttccagcgtgtggtcgtcaatggcttttacgcccagctcgctcggcgcttttttgccgtcaatgatttcgtcgacgttaacgatatgaccatattgcggatagctggcataaggagacgcggttttcggatccaccagacgctgccagctgtatacgaagtcctgggcggtaaccggctcgccgttagaccattttgcatctttacgcagatggaaggtccagactttaaaatctttattatcccagctctccgccacgccagggatcgggtggccatctttcggcgaagtattcagcaaaccttcgaacaggtcgcggctaatattggcctctggcaccccttcgattttatttgggtccagcgattgcggctcggcgccgctattacgtaccagggtttgcttctctgccagctgcacaccagccgggacatccgctgccattgccatattgccggcgatcagtgcggatagcactcccgcggcgattaaacgctttttagtgatgatggtcattgtgttgtaactccagtcattataattactggttttttaaccagcctgtttttcccgttttcgggttctgtccaacgcaggagtttgcgattggcagattgctatcaccgacttatttattacgaccgctcgaacggcagtcttaacgtcgattcgttgccctcgctggagggtcgttctggcgaaatgagttaattaaaaataattctcatttgcgtacataattcagcagacgataacggcggaaagtaccaaaaggtaaacacctccgccaatgcaatttgcaaatatgttaccgaattctcttttattgccggttttgccagcgtgacaagcgtttgccataaaacgtagatgtaaaaatattattatttatcagagcattacgataatttcatcagccgacattcagagcagcgaccacaagatggttttttgtacaaaaatttaacaatagattactttttagcacattcatctgccgccttgttaaaattactaatatcatttcgatgatccgacagcaagtaccagagaatgatgtgaggaaaataacatcacaggagtgggaggcgtgaggagaatgttaagagaaatatttcatatcttaatgaaaaatatgaaattaatagcgatatcgcaaaatattatccctaccgccagttccgcgttggctaataggttttgctaataatcgcgcaggcgtgaagcgagactccccgcctgctggcgacgaactaactcagcagccctgggaaaagcgctttaatcccggtcacaataaactcaatgccgagagccatcagcaacaggcccataatacgggtgatgacgttgattcccgtctgccccagcaaacggaccagccacggcgccatacggaaaatcccccagcagcagagggcaaataccgctatcgccagtgagaacccgaccagatgcacccaggagtggtaccgggtcccccagacgatagttgaactgattgcccctggcccggccattaatggtagcgcgagaggaacgacgccgatgctctcccggaccgccgtctccgacttttcctgcttgttctgcttatcttcgccgagcttaccgctgatcatcgacatcgcgatggtcaccaccaggatgccgccggcgatacggaaggagtcaatggagataccgaaaatctgcagaatgccatcgccgaggaacagcgacgtcaggaggatgatcgccaccgacaggttggcggtgaggttggtcttattacgcaccgcagccggctgatagctggtcatactgatgaataccggaataatgccaaccgggttaaccagggcaaataagccgatgaaaaacttgaaatatgcagaaaaatcgaacagtgattgagtcacattgggctccgcagcatcatcaaaattggcggttgactgttaacagcataaaataactgcgcgaaacatacgctttttacctgcaatattcattataaatatgcataacccggtgatatgtatcgaatgttagccatttgtatatttaatgctaatcgtttttttaatttcaaaaccctcccatcacacttgatcgaaccggtcaaaaagcagccagctgaaaggtatcagcagcgacaatacttgatctaaatcacgtaatttgtactcagaagtgagtaatcttgatgacaccaacagagtggaaggcagcagtacctgaaagcgaaagagataaagcttttttagtaaatcggtgaaacagcgccctgatttttctacataaacatttacatgcaagctgttaacggcctgtctataatgtcgaatcgagcgactgatttactaaaaaagtttaacattatcaggagagcattatggctgttactaatatcgctgaactgaacgcgcttgttgagcgtgtcaagaaagcccagcgtgaatatgccagtttcactcaagaacaagtcgacaaaatcttccgcgccgccgctctggccgctgcagatgctcgaatccctctcgccaaaatggccgtagccgaatccggcatgggcatcgttgaagacaaagtgatcaaaaaccactttgcttccgaatacatttacaacgcttataaagacgaaaaaacctgtggcgttctgtcagaagacgacacctttggcaccatcactattgctgagcctatcggcatcatctgcggtatcgtaccgaccactaacccgacttcaacagccattttcaaatcgctcatcagtctgaaaacgcgtaacgccatcattttctctccgcacccgcgtgcaaaagaagccaccaacaaagcggctgatatcgtgctgcaggctgccatcgcggccggcgcgccgaaggacctgattggctggatcgatcagccgtctgtagaactgtctaacgcgctgatgcatcacccggacatcaacctgatcctggcgaccggtggtccaggcatggtgaaagcagcgtacagctccggtaaacctgctatcggcgtcggcgccggtaacaccccggtagtcattgatgaaaccgccgacatcaaacgtgccgtagcgtccgtactgatgtctaaaaccttcgataacggcgtgatctgtgcttctgagcagtccgttgtggtggttgattcagtctatgacgcggttcgcgaacgtttcgccagccacggcggctatctgctgcagggtaaagagctgaaagccgttcaggacattatcctgaaaaatggcgcgctgaacgcggctatcgttggtcagccagcggccaaaatcgctgaactggcaggcttcaccgtgccggccaccaccaaaattctgattggtgaagtgaccaacgttgacgagagcgagccgtttgctcacgaaaaactgtctccgacgctggctatgtaccgtgcaaaagatttcgaagacgcggtagccaaagcagaaaaactggtcgccatgggcggtatcggccacacctcttgcctgtacaccgaccaggacaaccagccggctcgcgtggcttacttcggccaaatgatgaaaaccgcgcgtatcctgatcaacaccccggcttctcagggtggtatcggtgacctgtacaacttcaaactcgcgccttccctgactctgggttgtggttcctggggtggtaactccatctctgaaaacgttggtccgaaacacctgatcaacaagaaaaccgttgctaagcgagctgaaaacatgttgtggcacaaacttccgaaatctatctacttccgtcgtggctccctgccaatcgcactggatgaagtgattaccgatggtcacaaacgcgcgctgatcgtgactgaccgcttcctgttcaacaacggctatgccgatcagatcacttccgtactgaaagctgcgggtgttgagacggaagtcttcttcgaagttgaagctgacccgacgctgaccatcgtacgtaaaggtgccgacctggcaaactcctttaaaccagacgtgatcatcgccctgggcggcggttccccgatggatgcggcgaaaatcatgtgggttatgtacgaacatccggaaacccacttcgaagaactggcgctgcgctttatggatatccgtaaacgtatctataagttcccgaaaatgggcgtcaaagccaagatggtggcgatcactaccacttccggtaccggttctgaagttacgccgttcgccgtggtgaccgatgacgcgaccggtcagaaatacccgctggcagactacgcgctgaccccggatatggccattgtcgatgccaacctggtgatggatatgccgaaatcgctgtgtgcgttcggtggtctggatgcggtgactcacgccctggaagcttacgtttccgtactggcttctgagttctctgacggccaggcgctgcaggcgctgaaactgctgaaagagtatctgccggcttcctatcacgaaggttccaagaacccggttgcccgtgagcgcgtacacagtgccgcgactatcgccggtatcgcgttcgctaacgccttcctcggcgtgtgtcactcgatggcgcacaaactgggctcccagttccatattccgcacggtctggccaacgccctgctgatctgcaacgttatccgctataacgcgaatgacaacccgaccaagcagaccgcgttcagccagtacgaccgtccgcaggctcgtcgtcgttacgctgaaatcgccgatcacctgggcctctccgcaccaggcgaccgcaccgcagcgaaaatcgagaaactgctggcatggctggaaagcattaaagctgagctgggtattccgaaatctatccgcgaagctggcgttcaggaagctgacttcctggcccacgttgataaattgtctgaagatgcattcgatgaccagtgcaccggcgctaacccgcgctacccgctgatctccgaactgaaacagatcctgctggatacctactacggccgcgaattcgtcgaaggcgaagccggtgcgaaagccgaagttgctccggtaaaggctgagaaaaaagcgaaaaaatccgcttaaccaagagcgatagcatcgcgacaagccccgtcacctgacggggctttttttatccccgctatcagccattctttatcgccagctacgccaacctatagcagacattaaaaaggcgcccacaggcgcctgtacgagcttctgagggtatcagcagggacggtgctggttttgtaccttggttaacgaaccgacgctcagcgcctctttataatgcttacggcagaccgatacgtaccgctcattaccgccgatgacgacctgctcaccctcattataaggacgcccctcctgatcgaggcgcaataccatgctggccttgcggccgcagaagcagatcgttttcagctcaaccagcttatctgaccaggccagtaaatactggctgccggtaaagagctcaccgcgaaagtccgtccgcaacccatagcaaagcaccggaatatccagcgtatcgacaacttcggacagctcatgaacctgttcacgcgtcagaaactggctttcatccaccagcacgcagtgaatcggctttagctggtgctccgccgcaatatcgtcaaataacgaggtctgtggattatacaatcgggctggcgaggagagcccgatacgcgaactgacttttccggcgccaaagcggtcatcaatctcagcggtataaacgacggtacgcatcccccgctcctggtaattgtacgaagattgcaacagagcggtcgacttacctgcattcattgcagagtagtagaaataaagttgtgccatcggctgcgtgaccccaatcaaagtgttttatcgcggcgacgattgtaccatattttatgcgcacagccgcgctttcagcaggggtattgtcgcgaagctgaagggcctgcaaaccgaaaggattaagaagatgaattgaattttcagggccactatttgtacgccccgttacgctactggcgcggtaaccattgtcttttcgtgcttatagaccggttgcccaggggctataagcagggctgccggttgttttatattaagccttgtaaccaaaaatgcgctaatactgacgagggttatttacccatgtaaaggatcatttctctcactgaacctctcaaaaagcataccgtctcaatgttttagcttgccttcgcctcatcgctataagcgatgaaagatgtgaagcggcacgggaattttaacttaaattaattaattctcgcgacaaataaccagtaattttgaattccttacattcccccctattgcacaacgcattttatcgctctattattagttcaacaaaccaccccacaatataagtttgagattactacaatgagcgaagcacttaaaattttgaacaacatccgtactcttcgtgcgcaggcaagagaatgcaccctggaaacgctcgaagaaatgctggaaaaattagaagtcgtcgttaacgagcgccgtgaagaagaaaacgctgccgcggcagaaattgaagagcgtacgcgtaagctgcagcaataccgtgaaatgctgattgctgacggtattgatccgaatgaactgctgagcaccatggctgccgttaaagccggtaccaaaaccaagcgtgctgcacgtccggctaaatatagctatgttgacgaaaatggtgaaaccaaaacctggaccggtcagggccgtaccccggctgtgatcaaaaaagcaatggatgagcaaggtaaatcactggacgatttcctgatctaatctccgttgatcgctataaaaaatcccgctgcggcgggattttttttgccctcagggccgatataaaaaaaccgggagtcgcagatgcgctcccggtttgtgctttcaaccgcgcggcggattacttcgctaccgccgtttccagccaggctttaaaatcgtcgcccagcgttttgtgacgaataccatattcgacaaacgcctgcatgtagccaagcttattaccgcagtcatggctcttgcctttcatatgataagcttcaaccgtttctttctcgatcagcatatcaatggcgtcagtcagctgaatttcatcaccagcgcccggaggggttttcgccagcagcggccagatatcggcgctgaggacataacgccccaccaccgccaggttggacggcgcaacgtcagcttttggcttctcaaccacgcccaccatcggtacgctttcgcccggcttcagggattcgcctttgcagtcaaccacgccataagcggttacgtcttcgacaggttcaaccataatctggctggcgccagtctcatcgaagcgagagatcatctcagcgaggttatcgcggctcagatcggattcatattcatccagaataacgtctggcagaataaccgcgaccggctcatctcccactaccggatgggcgcacagcaccgcgtgacccagacctttcgccaggccctgacgaacttgcataatagtcacgtgcggcgggcaaatagactgcacttcttccagcagctggcgttttacacgtttttccagcatcgcttccagctcaaaactggtatcgaaatggttttcgatagagtttttcgacgagtgcgttaccagaacaatttcagtaattcctgcagcgatacattcattaacaacgtactgaattaacggcttatctaccagcggcagcatttcttttggaatcgctttggtggccggcagcatcctggtgcctaatcccgcaaccgggataaccgcttttctgactttagaattaagggcagccattgaaatctcctggactgtttgttttttaaacttctcgttacaaataacgtgtcgagtatatcagtcaaccgcgtatttactggtctgaaaagctgccgatagcctcgaattaggacttttacgcataaaactgctcgatgttaccaccgctaaagggcaagaggtaatcccgtctgcttagatataaacgcaattgctcattccgcagacaacattaagcgtaaacgaccgccagccccccaaatttggcactgccacgaggtgcagcgttggctaatttggttaagataagcatcacccagtgtccccaaaggaacgccattactaatctgaatttgatgctcccccgtattcagcgtgccattaagtcccgctgacaccagaattaaatttttcagcccgctgtggtaataccctactaacagagggaactggcccggaagatttgcctgacgcagcagttgattcacctgttttaacaaacttcccatttctggtagccgttgtccctggtgcgccagttgctcctgcagcagaccattaaacaacgcgcgcagcaataatgctgccaacacgccattatcgcctgcgcgtgtgacatccagacaatagaaagccaaatcattttccgaaagcggcgcgatatcaagtaccagaccgggcttgtctgccgacaccagttgtcgataatgaacgcggcagtgcgacatttcctgttgcaccggcggctgtaattcctgcaatagtcttgaagcggcgatgggattactgaccagcgcatcccagtcctcaaataaacgctcttcctcttccacgcgcgaactgaacatcgcgggatagagacaggcgtaaacggtctcgcgcaggcgatcgaaatcttttactggctttaacagcacgtcctggacgccaagtcgcaacgctttagctatatccgccatgttttcggtggcggagatcatcaggatcggtaactgttcgccgcggttacgcagcgtttccaccagctccagaccgttcattctcggcatagaaatgtcgcaaatcatcaggtccggatgcacctccgtcattttatgcagggcatccttgccatcttccgcctggaaggttgttgctcccagcgaggtcagccatccatgcaagagtgagcggaaaacgggttcgtcttcaactatcagaatctgttttcccgccaatggctgcgtcatgatatctcccctggctgacgataattcaatagtggcacgctattctcactatcgcctgtcagaatttgcttaagtcagtaactcgtacgtcaaacggctgtacgcactaagggtaataattcatccattttcttttctaccgccagttgccccgcggcaatcgcctctccggcgcgatgaaaatcaagcgtcgaaacttgcggacagtatggctgcaacaggatatccggcgggtcacccgccatacgattgcgtttaagacggttttccagtacctggatagaggtggtcatgatctccatcgccgtcggcgtcacggccgtacggcgggaactcattcgcgtcaagcgcgcgcgcagacgagtatgccatggcccctccttctcttccgcttcctgccgcggcgtttcaagggagaacaaatcctgctgcataagatgggcatcatgttgcaggtcgacggcaatcacaatatccgctcccattgcccgggtgagcgacacaggaaccggattgaccaccgcgccatcgaccagccagtaaccattatgccttactggcgacattaaccccggcatactgcaggaggcgcgaatggctaaatgtagatcgccttcggtaaaccacagctccctaccggtgcttaaattggtggcaacagcagcaaaccggcgctcgcagcgttcaatctcggtgacgggcataatgcggcggtaatgattgaatactttttccccccgcagcagtcccccccggcgccaggagagatccatcagcttcaggacatcccagttgctgaatgagcagacccatgattcgagtgccgggagtcggttacaggcatacgccgcccctaccagcgaaccgatagaacaaccggctacgatatcaatctcaataccggcccgctggagggcgttgatgacgccaatgtgcgaccatccgcgagcggctcccgcacctagcgccagaccaattttaagctttctcattagtactaataactatccttccactctgagcgtggcaacattgtcacggctcagttaacataatgccctttggcgtagaagcgccgttactctttcttccatggaggcagttttgtcgcaattatgcccctgtggcagcgcactggagtatagctcatgttgccagcgatatctgtccggcgctgagcttgcgccgggcccgtcacagcttatgcgctcccgttatagcgcgttcgtcatgaaagacgctgactatctaatcaaaacctggcatccgttctgtcaggcgcagcaatttcgcgccgaactggagaaagggttttcccagaccgaatggctgggcttaaccctgttcgccagtgatgaggggcgagctccaaatgaaggttttgtcagctttgtcgcccgctttaatgacaataaccgccctggcgccattattgaacgttccagattcttaaaagaaaatggacagtggtactatatcgacgggacacgaccgctgattggccgtaacgacccctgcccctgcggctcaggtaaaaaatttaaaaaatgctgcggccagtaacgctggcacagcgcttgcaaacattacaggattttcctcgcgatgcattcattacaacgtaaagtactacgcactatttgccctgatcagaaaggcctcatcgcgcgtatcaccaatatctgctacaagcatgaactcaacattgtgcagaacaatgagtttgttgaccaccgtaccggtcgtttctttatgcgcaccgaactggaaggcatttttaacgacgctactctgctggccgatctcgacagcgccctgcctgaaggctccatccgcgaactaaatccggcaggccgtcgccgggtggtgattctggtgacgaaagaggcgcactgtctgggcgatctgctgatgaaagccaactacggcgggctggatgtcgatattgccgcggttatcggcaaccatgacaccctgcgctcgttggtggagcgctttggtattccgtttgagctggtcagccatgaaggactgagccgcgaagaacacgatcagcggatgggcgatgctatcgccgcccacgaaccggattacgtggtgctggccaagtatatgcgcgtcctgacgccagaatttgtcgcccgcttcccgaacaaaatcatcaatatccaccattcgtttttgccggcgtttatcggcgcccgtccctatcatcaggcctatgagcgcggcgtgaaaatcattggcgctaccgcccactacgtgaatgacaatctggatgaaggcccgatcatcatgcaggacgtgattcacgtcgatcatacttataccgcagaagatatgatgcgcgctgggcgcgatgtcgaaaaaaacgtcttgagccgggcgctgtatcaggtactggcgcagcgcgtcttcgtttacggtaaccggacgattattctttaatcgactgagaaatgaattggttagctttacggcgttacgtgtaaaaatcaggcaaccagtttatttttgtcaaacgaatgctttacaggggcgcatcatttggtatgatgcgccccgcttcccgagaaggaagcaggccagtaccaagcattaccccgtggtggggttcccgagcggccaaagggagcagactgtaaatctgccgtcatcgacttcgaaggttcgaatccttcccccaccaccattattcactacagtgatatggtttccccgacaagcgtaaacgatgtttgcacttagcgggaagggtaagaaccttcgactaaggttcgactcgagcgccagcgagagaacgttgccgcaggcaacggcccgaagggcgaggagagatagcgacgagttatccttcccccaccaccattcattttgctgaatagcctacaatgtgattttacccctggtggggttcccgagcggccaaagggagcagactgtaaatctgccgtcatcgacttcgaaggttcgaatccttcccccaccaccatctccccatgccatgcccagcataatctacctacggtattctatattctgccctacagggaaggatgagaagcttcgactaaggttcgactcgagcgaagcgagagaacgttgccgcaggcaacggcccgaagggcgaggcgctttagcgccgagtaatccttcccccaccaccatctccccatgtcatgcccagcataatctacctacgatattctatattctgccccacggggaaggatgagaagcttcgaccaaggttcgactcgagcgaaacgagagaacgttgccgcaggcaacggcccgaagggcgaggcgctttagcgccgagtaatccttcccccaccaccatcttcttaaaaaacacctcaatccaattattctacgatattctatattctgccccacggggaaggatgagaagcttcgaccaaggttcgactcgagcgaagcgagagaacgttgccgcaggcaacggcccgaagggcgaagcgctttagcgccgagtaatccttcccccaccactgttgcactctcagccacctgttctgctgtctcatcgctcgcgcttcgcttagcgaggctacaagtggtgccgtctggtagcccggacaggtgcgcagcaccgcctccggaaaaactcacagcggtggcaaccgcctttttaccggcgagcttttcaccaccgaggtgttacactgcgcatactccgccagactgtccagcagggtatccagctgggcaatatcgcgcaccacgagacgcatcacaaaacaatcttccccggtcaccttgtcactttcaatacattccggcatcgcctggatatatttatccaccttctgcagcagcccaggcagcggacggacccgcaccagcgcctgcaggctatagcccagcgcggcgagatttacccgcgccccatagccctgaatgacaccccgctcctccaggcgcttcacccgctcggcggtgctcggcgaggtcagccccacccgcgcgctcaggaccttgagcgaaactctggcatcctgagtcaggcaggtgaggatcgcccggtcaatttcatcaagtacgtcattcatatatttcacctaattataaaaggcatttccccccttctaccttaattcagccatatcaccctgtcagggtttttcgcacaataactaaaaaatggtggaggtgaaaaatgcaacttacccgcggcgtctggcagatgagcctggcaatgataatctccggctcgatcggcgcgttcgtgctgctctctggtttgccggtgactgatgtggtgttctggcgctgcctgattggcgcgctaaccctgctggtgtttatcgtgttaagccgccagcccttcagccggctaacgcgtttcactctcgctctggcggtgattggcggcgcggcgctggtcgtcaactggctgctgctgtttgccgcctattcacggatctcaatcggtatggccaccgtggtctataacacccagccgtttatgctggtactgatggggatggtgctgggggaacgggtcagcgccgtgaaatggggatggttactgctggcctttggcggcctagtgatcctgctgtcgagcgagctgacgcctgcacacgaagaggggcttaccaccggcgtgttgctggcgctgggcgcggcattcttctatgccctgactgccatcatcgcgcgcaaactgcatccgctccccgcgcagcatatcgccttcatttaggttctcgtcggcgtcgtgatgctgctgccgctggtgcatgccccagaattgacggccagcttcccctggcgctatctgctgatcctcggcatcgtccataccgggatcatgtatcagcttttatatagcgcgatacagaaactgccgacgcccgttaccggttcgctctcctttatttatccgctggtggcgatggtggtcgactatctggtcttccaccatgcgttatccgcggtgcaattgctcggtgggatgcttattctgtttgccgccgcagggaataatctcggctggggcgaaaaaaaaccccgccgcggcggggtcagtgagcagtcgcgggccagttagcgacgggcgcggacaatctggtatttgcgcgtcaggtattcgaccggcgcgctccagatatgaaccagacgggagaacgggaacagcaggaacagggtcatgcccagcaccaggtgaacgcggaaaataaacgccacgccatccagatgctgtgacgcgccgccgtggaacgtcaccaccgactgcgcccagccgaccagtttcatcatttcactgccgtccatatgctgagcggagaacgggatcgtcagcaggccgagcgcacactgcaccatcagcaacgagaggatcagaatatccgctccggtggtggtggcgcgaacgcgcgggctgagcagacgacgcttgagcagcagtaacccgcccaccagggtcatcacgccgcaggcgccgccggcgatcatcgccatcttctgcttgacgtcgatcggcaggaaggactcatacatccagtgcggggtcagcatgccgaggaagtggccggcgaaaatacccaggatgccgatatggaacaggttcgacgccaggttcatccccttacggtccagcatctggctggaggcggcgcgccaggtgtactggccatagtcatagcgcaaccagctgccaatcaggaacaccgaacccgcaatgtacggataaatgtcaaagaagaacatattcaggaagtgcattattgctgtcctccgttagagatattcagatattgcggggccacggctccggcaaaacgacgctggtgagcggaaatttccgactcgccgcagccctggtcggcaaagaatttgacctgttcttcttcccagacggcgtccagcgcctgcggcgtatcgtcgcgcgcttcgtcggcaatcttctccgccaccttctggctgtcgacctgcgtattggccagcttcagcaatagctcgaacagcaccgcatagcgactttcgcgctgctgcaggcgcgcgctgagcagaccgaggatcggcgcgacgtcccgcaggccgccaagcgcttcctcttccggcagctgcgccagatactccagatatagcggcagatgatccggcagctcatggctatccagcagcagaccgtggcgctcgtactgcgccatcaggtcgaccatcgcctgcccgcgatcgcgggattcgccgtggacatgttcaaacagcagcagcgaggtggcccggccgcggtcaaacagttcgctataggccgcctgggcgtccagcggatcctgagccactaaatcgcgcaggaaaacgcccagcgcgtgggcatcctctttgctgagtttctctgatgacgcgagcgcctcgaacatctcctgctgatgctgccataaggcagcgtcaggatattcgagcagacgcgatacaatcacgagttcaatcatgcgtgcggctccgttttgctggtcacgtcgatggcgtcgatgcgacggctgttgaacaggttgaactgactgtcagagccgtggcagccatcgccaaagctaaagccgcagccgtttttctccggaaacgcttctcgcgcctgttcacgatggctgctcggcaccacgaaacgatcttcgtagttggcgatcgccagatagcgatacatttcctgggcctgcgcttcgctcagccccacctcttccagcgcgcgggtatcaacgacgccgtcaacggtttccgcacgcttatagtggcgcatcgccagcattcgtttcagcgccagcagtaccggctgggtatcgcccgcggtcagcaggttcgccagatattgcaccggaatacgcaggctttccacgtccggcaggatcccgttgctacccagttcacccgcatcggcggcggactgaatcggcgacagcggcggcacgtaccagaccattggcaaggtgcgatattccgggtgcagcggcagggccagcttccagtccatcgccattttgtaaaccggcgactgctgcgcagcttcaatgaccccctgcggtacgccatctttcagcgcctgctcgatcactttcggatcgttgggatcgaggaacacgtccagctgacgctgatacagatctttctcgttctcggtgctggcggcgttttcaatcgcgtccgcgtcgtatagcaggacaccgagataacggatacggcccacgcaggtttcggagcacaccgtcggcatcccggattcaatacgcgggtagcagaagatgcatttctcggatttcccgctcttccagttgaaatagatcttcttgtacggacagccggtgatacacatccgccagccgcggcacttgtcctggtcgatcaatacgatgccgtcttcttcacgcttatagatggcgccgctcgggcaggtcgcgacgcaggccgggttcaggcagtgctcgcacaggcgcggcagatacatcatgaaggtgttttcgaactggccgtacatcgccttctgcatgttgtcgaagttctgatctttggcgcgtttttcaaactcgccgccgaggatctcttcccagttcggaccgctggtgatcttgtccatccgctggccggtgatcagcgagcgcggacgggcgatcggctgatgtttgctctccggcgcgttatgcagattctggtagtcataatcaaacggctcgtagtaatcatcgatgcccggcagatgcgggttggcgaagattttacccaacagcatcgcgcgattgcccatgcgcggctgcagtttaccgttgattttgcggatccagccgcccttccatttttcctggttttcccagtcgttcgggaaaccgacgcccggcttactttccacgttgttgaaccaggcgtattccatcccttcccggctggtccagacgtttttacaggtcaccgagcaggtgtggcagccgatgcacttatcgagattcagcaccatgccgacttgtgaacgaattttcattttacgctctcctgtacctggtcgttgccttcgccgtctaaccagttaatgttcttcatcttacgtaccaccacaaactcatcgcggttggaaccgacggtgccgtagtagttaaagccataggccaggtgaccgtagccgccgatcatgtgggtcggtttcggcgtaatacgggtgacggagttatggatccccccgcgctgaccggtgatttcagagcccggcaggttcacgatacgttcctgcgcgtgatacatcatggtcatcccggctggaacgcgctgactcaccaccgcacgcgccgtcagggcgccgttggcgttgaagacttcgatccagtcgttatcttcgatacccagatctttcgcatccgcttcgctcatccagacaatcggcccaccgcgcgacagggtcagcatcagcagattatcgctgtaggtcgagtggataccccatttctggtgcggggtcaggaagttcagcgccttctccgggttgccgttggacttctcgcccatcaccgctttcaccgaacgggtgtcaatcggcggacgatagaccagcaggctttcgccaaagtcgcgcatccactgatgatcctgatacagcgattgacggccggacagcgtgcgccacgggatcagctcgtgaacgttggtgtaaccggcgttataggagacatgctcatcttccaggccagaccaggtcgggctggagataatcttccgcggctgcgcctgaatatcgcggaagcggatcttctcgtcttctttgttcagcgccaggtgcgtatgctcgcgaccggtgatctcgctcagcgcttgccacgctttcaccgccacctgaccgttggtttccggggccagggtgaggatcatttccgcggcgtcgatggccgtttccagcttcggctggcctttcgccgggccttccgccttggtgtagttgagcttacgcagcagatccatctcgctctgggtgttccaggcgatgcctttcccgccgttgccgatggtttccaacagcgggccgatcgaggtgaaacgctcgtaggtcgccgggtaatcacgctcaaccggaataatatgcggcgcggttttcccggggatgagatcgcattcgccttttttccagtctttgacatccagcggctgcgccatttccgcggcggagtcgtgctggatcggcagggttaccacgtcggtttctttaccgaggtggcccacgcacacttcagagaatttcttcgcgatacctttatagatctcccagtcgctcttcgattcccaggctggatcaacggcggccgacagcgggtgaataaacggatgcatatccgaggtattcatgtcgtctttttcgtaccaggtggcggtcggcagcacgatgtcggagtagagacaggtgctcgacagacggaaatcgagggtcaccaccagatccagtttgccgtcgaggccgttatcccgccattcgacttcttccggcttcacgccgccctgcttgcccaggtctttgccctgaatgccgttctcggtacccagcaggtacttgagcatgtattcatggcctttaccggaggagcccagcaggttggaacgccagataaacaggttacgcgggtggtttttgccattttccggctgctcggccgcaaagcgaatcgagccctctttcagcgacttcacggtgtaatccaccggggtcatgccggctttcttcgcttcgtcagcgatacgcagcgggttgacgccaagctgcggcgccgacggcagccagcccatccgctctgcgcgcacgttaaagtcgatcaggtggccgctgtaacgggatttatccgccatcggcgacagcagttcctgcgcggtcaccgtttcatagcgccactggctggagtggttatagaagtacgaggtactattcatgtgacgtgccggacgctgccagtcaagggcgaatgccagcggctgccagccggtctgcggacgcagtttttcctggcccacatagtgcgcccaaccgccgccgctctgaccgacgcagccgcagaagatcagcatattgatcaggccgcggtagttcatgtcgaggtgaaaccagtggttgaggcccgccccgacgataatcatcgaacgaccgtgagttttatcggcgttatcggcaaattcacgggcggtacggatgatatgcgcgcgggagacgccggtgatcttctccgcccacgccggggtgtaggctttcacttcatcgtagccggcggcgcagttgtcatcgttcagaccgcgctccaggccgtagttagccatggtcaggtcatacacggtggtgaccagggcggtagagccgtcggccagctgcaggcgtttagccggcagtttgtgcagcagaatgttttccagatcgactttgttaaagtgctcagacccttcgccgccgaagtacgggaagccgacgttcgccacttcatcatggctgcccagcaggctcagacgtagctcaatctcttcgccagttttaccgtcgcgctgttcgaggttccatttgcctttgtcgccccagcggaatccgagggaaccgttcggtacggtcatgtcgcccttctcgtcaaaggcgacggttttccattccggattgttctcctgaccaagggaatccacgaggtcggatgcgcgcagcgtacggccggcggcataataaccgtcgcgctcctcgagcatcaccagcatcggcatgtcggtatagcggcgcacatagtcggtgaaatactggctcggcttatcgaggtggaattcacgcagcatcacatggcccatcgccagcgccatcgcggcatcggtaccctgcttcggcgccagccacagatcgcagagtttggcgatttcggcgtagtccggagtgatggccacggttttggtccctttatagcggacttcggtaaagaagtgcgcatccggggtgcgggtctgcggcacgttggagccccaggcgatgatatagctggagttataccagtcggcggattccggcacatcggtctgctcgccccaggtcatcggcgaagccggaggcaggtcgcagtaccagtcgtagaagctcaggcaggtgccgccgatcagcgacagataacgggcgccggacgcgtaggagaccatcgacatcgccgggatcggcgagaagccagccacgcggtccggaccgtaggttttgacggtatagacgttggaggcggcaatcagctcattcacttcctgccaggaggaacgtacaaaaccgccgcgaccgcgggcctgtttgaagcttttagctttgtcggcgtcttcgataatcgacgcccatgcctcaaccggatcgctatgctgaactttcgcttcccgccacatcttcatgaggcgtttacgcatcagcgggtatttcaggcggttagcgctgtacaggtaccaggagtagctggcgccgcgcgggcaaccgcgtggttcgtggttcggcaggtccgggcgggtgcgcgggtagtcagtctgctgcgtttcccaggtcaccagaccgtttttgacataaatcttccagctgcatgagccggtgcagttgacaccgtgagtggaacgcacaattttgtcatgctgccaacgttgacggtatccatcctcccagtcccggttggtgtttagaagctggccgtgcccatcggcaaaggtttcacccttctgtttgaagtagcgaaaccggtccaggaatttactcatcgggtttctcctgatatggagcctgacggctctctgataaatcgacattgctggatttgcagcgaaggtaacgctatgaaagagggcgagaattgatagcgatcaatccgaactggcttgttactgcgcagcaaaacctcgattaccaccaaggtggtataagatgttattttttaacttgttgttttttaatgattttaacctcaaaaagcggcacctcaccgggatttgttaacaacggaggtattaaggggtagagccatttcactggcaagcccacctgttctggctcagcggtcgatgcggacaatatcctccgttagtatgttgtaactaattgagcggttaaaaaaggcgcctccgtggggagcgcgcctttttatacgccaacgttaccgcggccgattactgacgcttacgaccgtataccgcccaggtgatcaccacgcaggcaatatagaacacgaggaacactttcatcgccccggccggcgagccggtcagatccagcgagataccgaacgctttcggaataaagaagccgccgatagcgccaatggcggagataaagcccagcgccgccgcggtatcggtcgccgcctcgcgcatcgcctgcgcttcgctgccgccctgggccttcacgcggtccatagtcagcttacggaagatcacggagatcatctggaaggtggaggcgctccccagcccggcggtcaggaacagcaccataaacaccgcgaagaaggcgataaagttaccgccctggccgttggtcggcagggtcaggaacagcagcgcgcagaagacagccatcaccacaaagttgaccagcgttacgcgggtcccaccgaggcggtcggagatcgccccgcccatcgaacgcgccagcgcgccaatgaacgggccgaagaaggcgtaatgcaggatctgcacatccgggaactgagtttttgacagcatcgcgaacccggcggaaaagccgataaaggagccgaaggtcgcgagatagagcagcgccataatccacagatgcaggcgcttaagtaccggcaactgctcgctcagcgacgctttcgaagccgacaggtcgttcataaagaaccacgccgccagagtgaaaataatcaggaaaggtacccagatccacgcggcgttttccagatacagcatcgagccgtccggttgctcgctaccgttaccgccaaaaacggcaaagatagagatcgagaccaccagcggcgcgaccagctgcatcacgctgacgcccatattgccaagtccgccgttaacgccgagcgccccgccctgcttcgctttcgggaagaagaagctgatgttggccatactggaggcaaagttggctccggcgaagccgcacagcagagagataatcacgaagatgctaaacggcgtagaggtatcctggaccgcgaagcccagccagacgcatggcacaatcatgatcccggtgctgaacgccgtccagcgacggccgccgaacagcggcaccataaaggcgtaaggcacgcgtaataaggcgcctgacagcgccggcagcgcggtcagcataaacagctgatcggttgtaaactgaaagcctactttgttgaggttaacggcaaccgcgctgaacaacatccaaacgcagaacgccagtaacagacagggaacggagatccataaattgcggcttgccacacgatggccgcgctgttgccagaattcaggatcttcaggccgccagtcggttatgaccgagcggttagccttctccgggagggaagattgactcatagatacctctgattattcatatttcctgccgctaccttaggggttacccggggcggtaagttgatataaatcaaaggaaaagcgcgagctaatttgtgcaaaaataaaccatgcctccaagtgagtagagaatgatggggaaaaaagtgtggtttttcacgctgctgccgggttgcgtataatcccccccctaacatcgcctaccaccgacaattaaggagtaactctttgggggtatgggtatactccaggggatagtcgagaataagcgccactcccggagacatgaccggtcaggagccacgcattccatgttaaaacgtctttttaccccgctgacgctggtcaatcaactggcgttaatcgtgctgctcgccacgattattggcgtcgccggcatggcgatctccgcgcgcctggtgaacggcgtgcagggcagcgcgcacgccattaacaaggccggttcattgcgtatgcaaagctaccggctgctggcggcgatcccgctgaatgaaaacgatcaaaaactggtggcggacatgaccgccaccgtcttcagcccggagctgcaaaattccgcccgccgcgacggccaggaaatccagcttaaagccctgcagcagtactggcagctggcgctggcccccgggatgcagcgcgcagtcaatcaggcggaagtggcccaggatgtcgccgactttgtcgatcgtatcgaccagttggtcaccgcattcgaccacaccaccgagcagcgtatcgaacgggtggtctggatctatcgcatcctcgccattggtatggcgctgctgctgatcttcactatcatctggctacgcgcccgcctgctgcggccgtggaaacagctgctgagcatggcgcgcgcggtgagccagcgtgatttcacccagcgggcgcacatcagcggccgcaacgaaatggcgaccctgggcatggcgttgaataacatgtcggaagagctggcggaaagctatgccgtgctcgagcggcgggtgcaggagaagactgccggactggagcagaagaacgagatcctcgctttcttatggcaggccaaccgccggctgcactccagcgccccgctctgcgaacgtatttcgccggtactgaatggcctgcaggggctgacgctgctgcgcgatatcgaggtacgggtttacgacctggaagacgaagataatcaccaggagtttacctgccactcggatgatgactgtgatgataaaggctgctacctctgtccacgcaatctgccgccgctgccggatggcggaacaacgctgaagtggcggctgtcggatgcgcatagtcagtacggcatcctgttggcgacgctgccggttggccgccatctcagccacgatcagcagcagctggtggataccctggtggaacagctgaccagcaccctggcgctggaccgccatcaggagaagcagcagcagctgatcgtcatggaagaacgggccactatcgcccgcgagctgcacgactccatcgcccagtcgctatcctgtatgaagatgcaggttagctgtctgcagatgcaaggcgacgccctgccgacggagagccgccagctgctggggcagatccgtaacgaactgaatacctcgtgggcccagctgcgggagctgttaaccaccttccgcctgcagttgaccgagccggggctgcgcccggcgctggaggccagctgtcaggagtacagcgcccacttcggctttacggtgcagcttgattaccagctcccgccgcgctttgtgccctcgcatcaggcgatccacctgctgcagatcgctcgcgaagcgttgagcaacgctctgaagcatgccagcgcgaccgaagtgaccgtgacggtgtcacaacgcgataatcaggttcgtctggtggtagcggataacggccgcggcgtaccggaccacgccgaacggagtaaccattacggtttaattattatgcgggatcgcgcccagagcttgcgcggtgactgtcaggtacgacgccgggaaaccggtggaaccgaagtgatcgtcacgtttatcccggaaaaaacgttttccatccaataaggagaccctcatgagtcaacaggaacgggcaactatccttctcattgacgaccatccgatgctgcgcaccggcgtgaaacagttgatcagcatggcgccggacatccaggtgattggcgaggccagcaatggcgcgcaaggtattgagctggccgagtcgctggatcctgacctgatcctgctggaccttaatatgccgggcatgaacggtctggagacgctggataagctgcgtgagaaatccctttctggccgggtagtggtcttcagcgtctccaaccatgaagaggacgttgtcaccgccctgaagcgcggcgccgatggctatttgttgaaggacatggaaccggaagatctgctgaaagcgctgcagcaggcggccgccggagagatggtattaagcgaagcgttaacgccggtgctggccgccagcctgcgcgccaaccgcgccacctccgatcgcgacatcagccagctgaccccgcgcgagcgcgacattctcaagctgatagcccagggactgccgaacaaaatgatcgcccgtcgcctggatatcaccgaaagcaccgtcaaagtacacgtaaagcacatgctgaagaaaatgaagctcaaatcccgcgtggaagcggcggtatgggtccaccaggagcgaatcttctaaggcgagtccgtccaggagacgcctggcgtggtaaacttgaccagcggctcggtcagcgccagggcgatctcattggaggagacgcgctgcccctgtttatcctccaccaccaccgacaggcgccagcggttcgcggcgcccggttcactgttccacaccggcataatgatgctccagccatcggggctgctggcatctaccggcggcgtcaggctgagggcctgggtgtctccctgccagtgcagcgccttgatgccatgcagactatggatctgcagcttcaactgcaccgtctccccggactgcagatcccagggcggcgtggccagatagaccgtcagatttttgcgctgacgatactccaccaccggcagattatcccgctccggactatcgaagcggctcccgcgcagcgagttgctgatcgccacctcgtctgccgcaagctgctgcttaaggggtacgccaaagcgatagtttagcttcagtcccacattgttctggctgacgccattttccccctgcttatgcttagcggtcaccgtgaccagcgggaccggggtgtaattgagcccaacggagacggccaccggattatggtagccggtgccggagtgaaacagatcgacgctatcgccgaaatactgttcgacgctgacgctggtgttgatgtgctggtagaacggcagccgcgcctgggcggtgacgtcataccctgcggccatccgctgctcctgagtctgattatcgcgtagctgccagtcgcccagcggatggtaatagtttgccgacaggcggagatattctccccacgcttcggcgccaacgctgccgcgcgccaggctttcgctcagaactttatcgtaaaacgagttatagcccagcagccaaccgccgacccgccaacgctggccaagcccgatgttgcccaccagatcgtgctcgcgccgggtcaccgagtactggttccacgtcagataacggtcgttatcctgcaacggcacgaaccagctccctttactgccggtgaatttcccctctttatcgaccagcaggtcgacattggcgttgccccacggcgagagccaactctccagctgatgactcacttcattgccgattttactgatggcaaacagctgcgcctgttcacccgccgtcagaccattgtcgctcatgctggcctcgccaaacttcttcgccacttcggcaaagtgccgggcgtcgtcatcaacctggggagcaatccccatatcgggcagcggatcttgcgcttgcgcagggcgggtggtgtcgctggcggtcagcgcccagacgggaacgcccggcaacagcaggagaaaggtcaacgttggcaacaaacggaacgacacaggcattaacagagtttgcgcaagctcacaaaaatggatagaagtgttagtttatcgttttttccctgctcccgcagccctgtgggcaattccaggaataagctgaaaccggttgggtaaggtgccgcccaaccggaggcgtcgctgcgcgccaccgttacgcccgggttcgttgcgccgccagcagcgcgttgagctccggcacgcaagagccgcagttggtcccgcatttcagcttcccacccagcgccccgacgctggcgcagccgctggcgatggcctcgttaattgaccattcccccaccccaaagcagctgcagacgatccgcccccgcggcgcgactgcggcgcccggtcggccgctaagcaaggcatgtcgttgggcagcatcggacggcggcgcggcaaaggcagcgcttatccatgcgcaatccaccgccggctcgcgcgcatcgctccaccagccgagcatcagccttccctgatgccaggccagcaggttccacaccgcgccgccgtcagccacctgtaactgccagccgcgccgggcgcaccacgcgctgagccactgtcgggcagatgcctccccggccagcgagtagtgcagcacgcctggcgtcgcccgccgccgccagtgccaggccgcaggaaatggtagcggttcgcggcaaaaaagctcgctgtgccaggccggttgccaggcggcaatcgccaccgccgcctgtttactttccggctggccggaatacgggtccgtgacggcggccagcaggttattcacccgcccctgacgggcaaactggttgttccagtgcatcggaacaaacagcgagccggggcgctgcccttcgctgatcgccactttcgccaccatcaccccatgccgcgaccagatccgcgccagcccgtcagcgggaagctgatagcgaacggcatcctgcggcgccacctccaccattggctccgcgatatgctgcatcagccgcggcactgcgccggtacgggtcatggtgtgccactgatcgcggatccgcccgctgttgaggatcagcggataaaaggcatcggttgtcgcccgggtcggttgaggcgtcaccggcaccatccgcagcctgccatcgccatgccagccgcgcgtgatatcccaggcgacctcgctgcggctgaccggccagcgcaccggcggcatggcgtcccacgcctcacggctgagatccgccagcgcgccgatatcaaacgcccgctggccgtcgttttcgaaaccggacagcgccgcatgctcgcggaagacgtcatgcggatgctgccaggcaaacgcctcgcgataccccagcgcctggcccactctggcgatgatccaccagtccgctttcgcctcccccggcggcggcagaaagctgcgctgacgggatatccgccgctccgagttggtgaccgtgccattcttctcgccccaggccagcgctggaaagcggatgtgggcgaaacgtccggtatcggtctgggcggcgacatctgagacgatcaccagcggacaggcggccagcgcctggctcaccgcgtggctgtcagggagcgacaccaccgggttggtacccatgatccagaccgctttgacctcgccgcggccaatggcggcaaacagctccacggcggtcagcccgggggtctgcgccagccgttccgtcccccagaagcgggccagccgctgcagatcgtctggcacaaaatccatgtgcgccgccagcatcgtcgccagcccgccgacttcgcggccgcccatggcgttgggttgaccggtcagcgaaaaggggccgcagccgcggcggccatacttcccgctggccagatggacgttgatgatggcgttacatttgtcgctgccgctggcggattgattgattcccatggtgtagagggtgatcgcccgcggggcggcgatgaactcgcgatagaatcccgccacctcatcggcaggcagaccgcaaaaggacgccaccctcgccacgtcccagccgcgggcggcggccagcgcctgcgggccgtcgcgaaagccatcgacgcaggctcctgcctcagccagggcgttaagcagccccgcaaacaacccgccgtcgcttcccggggccagcgccagatggcggtcggcgatctcgcaggtagcggtgcgtcgggggtcgatcgccacgatccgcaatcggggattatcccgcttcgcctgcgccagccgctggaacagcaccggatgcgcccaggcggcgttcgagccgaccagcaccaccagatcgctgttttccacatcatcgtagctgcagggcaccacgtcggcgccaaaggcccgcttgtagccagtgaccgctgacgacatgcacagccgtgaattggtatcgatgttcgccgcgccgataaaccctttcatcagcttattggcggcatagtaatcctccgttaacagctggccggaggcgtaaaaggccaccgcttgcggtccgtgctggtcgatgatctgtctcaggcgcgcagcggtttccgccagcgcctgaggccaggctacctgctggccgtcgacctccggcgtcagcagccgccccgccaggcccgtggtctcccctaaggcggcccctttgacgcacagacggccgaggttcgccgggtgctgatcgtcgccgcgcacgctcacctgccccgcgtcgtccacgctcgccagcaccccgcagcctacgccgcagtaggggcaggtcgttcggatggtcttcatcaggaggcctccgcgcgggccagcagctgctggttgcccacccacactttgccgttttccactttcaccggccaggcgcgtaccgcctgttcactgccgtcgcacggccagccgtcgcgcaggcgtatccgctgtttgtacagcggggagatcaccaccggctcgccgccgacgtcccctaacagcccacgcgacagcacgttggccgcgctgcccggctcgcggttgtcgagggcgtagacccgctcgccgaagcggaacagggcaatctgccgctcccctaagcgggcgccgatccccgcctgcgccggaatggcgtcaaggtcgcataccgcctgccacggtcgggatgggagttcgccttcgggcaacgtctcagtcagcagcggctgcggctgaccgcgcagatcgcggcgctgcacagcctcgtcgggctggtcgctattaacgaaggagcggaacagcgccagacgctgcggatcgttgagggtggtctgccactcgcactggtagctgtcgacgatccgggccatctcctgctccagctcctcgccaatgccaagactatcctccagcaccacctgccgcagataggtgacgccgccctccaggttatccatccaggtgctggttcgctgcaggcgatcggcggtacggatatagaacatcagcagacgatcgatgctgcggatcagcgtcgcttcgtcgagatcgctggcaaacaggtcggcgtgacgcggtttcatcccgccgttgccgcagacgtacagattccagcctttgtcggtggcaatcaccccgatatctttcccctgggcttcagcgcattcgcgggtgcagccggagaccgccatcttgattttgtgcggggcgcgtagccctttatagcgatgctcgagccgtaccgcgagcccggtggagtcttgcacgccgtagcgacaccaggttgagccgacgcaggatttcaccgtgcgcagcgacttgccgtaggcgtggccggtttcaaacccggcgtcggccagctcgcgccagatagccggcagctgttccagccgcgcgccaaacaggtcgatgcgctggccgccggtcactttgctgtagagctggtaacgtttggcgatctgcccgatggcgatcagtccgtccggcgtcacttcccctgccgccatccgcggcaccaccgaatagctcccgtccttctggatattggcgaaatagcggtcgttggtatcctgcagcggcaggtgcgccggcttcagcaggtactcgttccagcaggaggccagcaccgaggccaccagcggtttgcagacatcgcagccgtgcccctggccgtagcggctaatcaactgctcgaaggtatggatatggttaacccgtaccagatggtagatctcctggcgcgaccacgggaaatgttcgcagacgtcttttttcacttcgacgccctgctccgccagctgatactccatcacctgtttcaccagcgcgctgcagccgccgcagccggtagccgctctggtgcagctttttatcgccgacatatcccccgccccattgttcaccgcctggcagatatcgcctttgctgacgttatggcaggagcagatcggcgcgctgtccggcagcgccgcgacgccgagcgccttcggcgcggctccctccagcgcgggcaggatcagactctccggacgcggcggcagcgccatgccgttcagcatcatctgcagcagcgtggcatagtcgctggcatcccccaccagcacgccgccaagcagggctttgccgtcctgactgacgacgatttttttgtaaatctgctgcggaccgtcggtccattgatagctctgacagcccggcgtgcgcccctgcgcatcgccaaacgaggccacgtcgacccccagcagcttcagtttggtgctcatgtcggcgccgctaaagcaggcgtcctctcctgcgagagtggccgcggcgatgcgcgccatctgatagcccggcgccaccagaccgtaaattttattgtcccacagggcgcattcgcctatcgccagcacgttcgggtcagaggtgcggcactggtcgtcgatgtgaattcccccgcgttcgcccacctgcagcgcgcagccgcgggccagcgcgtcctgcgggcggatccccgccgagaagaccaccatgtcggtccgcaacgcgccgccgtcggcaaagttcagccgcaggccgtcggcctcgcgcacgatggcggtggtcgctttgctggtatgcacccccacgccgagggcgacgatcttctcccggagcatcgccgccccgccgttatccagctggacggccatcaggttcggggcaaactccaccacctgcgtctccagccccagctgtttcagggcgttggccgcctccagcccgagcagcccgccgccgataaccaccccgctcttcgccgcggcggcatgggcggcgatacggtcgagatcgtcaagagtgcggtagacaaagcaccccgcgagatcgttaccggggattggcggaacaaagggatacgagccggtcgccagcaccagtttatcccagtggatttcatgcccctcggcgtcccgtaccagccgtgcgtcgcggtcgatggtcgccaccgcctcgccgaggcggagttcaataccatgttcaataaagaagtccccggccgccagcgacagcgactcggcgctgcgtccggcaaaatactcggagagatgtacccggtcgtaggcgggataacgctcttcgccaaacaccacgattcgatattgctgatgcagattgcggctcacgcattgctcgagaaaatggtggccgaccatgccatgtcccaccagcactaatacaggtttcgtcatcgtcattattcctgcagcctgcggctgcgttgaagaggggtcaaaaagccagtccacggtggcaggctcatcgctttccaggcgcgcggtaagcgcggcggcggcggtgcagtcgcccatcagcagcacgccgcgcaggcggccatcgcgcagcagcaggcgacgatagtggcggtcgatggggtcccagctggtataaatgtcatcctgttcgccgggctgctgctcgccagcgctaaagagttcaatgccggtgaccttcaggcgggtcccggcatcctgccagacaaagccctcgccgggggcgccgcacaggcgatccgccagcacctcggcctgacgcaggcagggagccaccagcccccaggtctggccgtcaatttcgcaacattcgccgatggcgctgatccccggcagcgaggaggccatctgacggtcgaccacgatcccccgctggcacagcacgccggactgcgccgccagacggctgtcaggctgcacgccggtagccagcaccactctggcggcgcggaatacgcgcccgtccgccagccgcacgccatcggcgtcgatggcggcgatgcggcactccagcacgcagcgaatgccgcgcgcttcaagctgctgcctgagctcatcggcggcaaaagcgtcggtcagcggcgccattaatccgctgccgcgatgcagaagagtgacctctccgccgtgacgacgcagcgccgccgccgcttccacccccagcaccccgccgccaatcaccaccgccgggccgggtatcgccagaatacgttccacgtccgccagggtgcggaagggcataacctgcggacgatcaatgcccggcagcggcgggataaagggccgcgaaccggtggcgaacaccagttcatcccacggcagccaggtttccgcgatgcgcagccgccgttgctgaatatcgacttcatcgaccgcctcgccagaccgcaggcacaccccgtgccgggtataccactccgccggcagcaacgggatctgcgccgccgttttttcacctgccagcagcggcgagagctgaatgcggttataggccgggtgcggctcgtcgccgacgacggtaatggcaaaccgcgcggggtcgcgctcaaccagccgctgcaccagccgggtggccgccatgccgttaccgatcaccaccagtcgccgcgtcatgaccgcctccttacgccgctttcggctgtttttcatacaggaaatggaggatctgctggcgcagatggtgataccggctgtcgtccgccagctgaacgcggtggcgcggacgcggcagatcgaccgcgaggatctcgccgaccgtcgccgccggaccgttggtcatcatcagcacccgatccgagagcagcaccgcttcatcaacgtcgtgggtgatcatgacgatggtggtattgagctcctgctggatatgcatcaccgtgtcctggaggtgggcgcgggtcagcgcatccagggcgccgaagggctcatcaagcagcaacactttcggcttcatcgccagcgcccgggcgatacccacccgctgcttcatgccgccggagatctccccgggacgtttgtgcagcgcatgacccatctgtacgcgcgccaggttgtgttcgatccactcccggcgctcactcttgctcatggtgcgacggaacacctgatccaccgccagcgccacattgtcgaaacagctcagccacggcagcagcgagtggttctggaaaaccaccgcccgctccggcccgggaccggcgatttcccggttatcacacagtagtccgccctcggtaggggtggtgatcccggcgatcaggttcagcagggtcgattttccgcaacccgagtggccgatcaggctaatggtctccccttcgacgatatcgaaggagacattctgcagcgccaggaactcgccgctggcggtgttgaagcgttggctgacggcctgcacctgaattaatggtttcatgttggctccttatttttcctgccagctaaagcggcgagcgagcagcatcaggccctgctccagcagcaggccgacgacgccgataatgacgatggcgatgatgatgttttccacattgaggttgttccactcgttccagatccagaagccgatccccagtccgccggtgagcatttccgccgccacgatcaccagccaggcgatgccgatggagaggcgcacgccggtaagcaccgccggcagcaccgccggaaagaggattttgcgcatcaccgtccactccgagagctggaggacgcgggcgacgttgagatagtcctgcgggatccgccgcacaccctccgcggtgttgatcaccatcggccagatggagcagataaaaatggtccagctggaagccggctccgccttctggaacagcagcaggccaatcggcagccaggccagcgggctgaccgggcgcagcagagcaatcagcggattaaacatgcgggcgaagaacagcgaacggccgatcaaaaaccccagcggaatgcccgccagcgccgccaggccgaagcccaccgccacgcgctgcagggaggccagcacgttccagccgatgcccatgtcattgggcccgtcctgatagaacggatcggcaaacagggtcagcgccgagtccagcgtgctcagcggcgtgggaaagcctttgctatgcatcgccgccagctgccaggccagcagcagcacacccagccccaacagcgggggcagcaggcgctgggtgagctcacgcagccagcgcgtgacggccggcgtggtgcgccggacctgcaccggcggcaggataatcacttcgccaggcgcgttgtccacgctgacgaccggttgcttacgttgtgcctgcttcatctcatgcccccttacgttgaatagagaaatggcgggcgtagccttccgggtcggacccgttccataccgtcccgtccattagtgtgctgctgcgcatcctggctgccggcgcgctgatccctcctaccgcctgggcggcagcctgccagacatcgatgcggttaatgcgcgacgccaccgcgaggtaatccggagcctgcttcagcaacccccagcggcggaactgggtgaggaaccacatcccgtccgacagccacgggaaactcacctcgcccccggcccagaagcgcatcggatgggcatcctgccagcggcggccaaggccgttgtcatactctcccagcatccggccggtgaggtattgctccttggtattgagccagccgcgtctggcgagcaggcgggccgtctcccgggtgttctccggcgaggcggcgatccagcgctgcgcctccatcagggccgccaccagcgcgcgggcggtgttcgggttgcgttccacccagtcgcgacgggtgcccagcaccttttccggatgctcgggccagatatcctgggaagtggccgcggtgaagccgatacggtcgttaatagcgcgggcgttccacggctcgccgacacaaaagccgctcatattgccgatgcgcatgttcatcaccatctgcggcggcggcaccacgacggtgcgcacatcgttgaagggatcgatgccggcgctcgccagccagtagtaaagccacatggcatgggtgccggtaggaaaggtatgggcgaaggtgtaactgcccggcgcgctgcggtcgatcagccgcttcagcccgccgaggtcggtcccccctttctcctgcagctcgctggagagggtaatcgcctggccattgcggttgagggtcatcaaattggccatcgcctgcggcttgctggcgatccccagttcgaggccgtacagcaggccatagagaatatgcgccgcgtcgagctcgccggccaccagcttgtcgcgcaccgccgcccagctggcttccttactcgccaccagggtgatgccatatttttggtcaaaccccttcgccgcggcgatggccagcggcgcgcaatcggtcagcggaataaatccgacccgcacgcgggtttgctccggtttgtccgagccgccggcccaggcggcctgcatcacgcccggcagcagcatcgcgccgcccagcgcggcccctgcctgcagcaagcgccgccgggaaattgaaaatttgtcgcccatatccgctccaccatgcgcaaaaaaaaagcgcccgacagtgcatacgcactgcaggacgcctttatccacggacacccgaaccgccattggttcgttgcccggacttttattcacttaataagtaatgcaaacgggatgccagctttggcaatagcgcgctggcgggctttttcccaacgctggccggtttttcacctaaaagtgcaccgccggcaggcaaagaatgcccatcgattgtgcatctactcctttggtgttagcggccaaatcgccttcaccatcagcagcgcgcgggctatctcaaccatgcgctgatttttgtccatggccatcttgcgcagcgtctgccaggcctgctcctcctgcattccctggtgcgtcatcagcagacttttcgctttttcgatcagcttgcgctcttcgagcgcgtctttcagcgaggccagctggctggagagctgctgcagctcataggcctgctggcgcaccagcggcagtagctgtttatcgagccgtggcgtcacgctatcgtcttcctctccggcctgccagccaggcgcgtcgtctgctaacagcgcgtcggtggcatccagcagatcgtcgatcagttgctcttccacttcgcgcagttgctcaagccgttgggtttgcaggccaaaccagcgcagcgccgtttccccgccgtcggcagccggctggcgggtacaggcgatccgccgcagctgttcaatatccagaccggcgtggcactgggttctgaacaactggacggtcgccgggctgcccagcgcctgaaagctgtcgaagcagggctgctgaccgtcaatacggtccaccagctgctggcgcaggctgtcgctgaactcgccgcgggtaaagcccaatgctcccagcgcgcgctcctggcccaccagctcttttccctgcataaagctgtacagggcgaccatccgaccagccaccggcggatcgtcaatgctgtcattgagctgcggggcgatgttcagcagatggcggatgacgcggctgaactgctccgtcgcggcttcagcggcaatttgccggcggccgatctgcgcgcgtagcgccgggagctgcgccagctcgtcaaccgctctggcgatacgccagcacagcgcgctgccggctaccgcgcgcgcccgttcgaggctggcataaaacagggctagccgctcgtcaaccagcgcccctcccgcccgacactccgctgtatacagcaagccgcccgagcaaagatagatattcgacgccccgcgctcacactgcagcatatgcaccagcgcgctgagctggctggccagttcccccagttggctaagctgctgaagctgttgtttttgcaggcgacgcgccagctgcagccaggccgtcgcatcgtgcgcatgaccagtcgtattattcatacccctcctccgggttaacgctttatactgcctaaagcaataaccgtgcctttaagaaggagtttgtatgcaacgtattgtgatcatcgccaacggcgccgcctacggcagcgaatccctgttcaacagcctgcgcctggccattgccctgcgcgagcagcagtccgacctcgatctcaagctgtttctgatgtccgacgccgtcaccgccgggctgcgggggcagaagccggcagaagggtataatgtgcagcagatgctggagatcctcaccgcccagcaggttcccgtgaagctgtgtaaaacctgcgcggacggccgcggggtcagcgcactgccgctggttgacggcgtggaggttggcactctcgttgagctggcccagtggaccctggcggcagataaagtgctgaccttctgaatctggggcgccaaacggcaggaaatatcaggtttcgccgcctgcagaggtaaaaaaaacgttagctgaatgctttcaggaacaacgtcatttttgtttaatctttatccctttttttgatcaaaatcagcatcccgacccgcgccgtttggtgtgatgcacagagcaaagtgtgaacaatatcacgcgaggactgggtgggcaggatgctgtagcgggacagaaacggggtataaaatggcgatggttaaagcaagtttgacgttatttggtggtgacacgctggtggtgcggtgctcagagcgctgccatattcatctgatgagcgcgaaggtcccgggcgacagtcatgcggatattctgagcgtgcaggatcgggacagcgcgtatctgacggtgccctacagcggcacctggaacgtgcttatcgacagtcacagccagtcgctggagcactccatcagctacgtgccggcctgaccgtcactgccagaacacacgcccggtcatgccgggcgtgagattcatgacaaacctcatgcaatcattgtacttgcagattgcaccagaaaaataacaaggaaaatcaatttattgattttcggctgataaccaccagtaaggaaaaatcacgctttttccttactggtcagcaatcggacgcccggtcatgccgggcgttttcttttgcgcgcgctcaggccaggcccggcgtcggactctcgcccaacagcgcgcggacgctggccaccaggtcatcgagactggcatcgtgcatgcccagcttgcgcagcgcctgctcaagcgaaaacagatactgggcgttggtgccgagcggcccgctggcccgggcgatcagcggggcgataacctgggcactggtatccggttcaaacagtggatggcgcggatccataataaacaccagggcattcaccgtccgtccgtcgtccagctccagcttgcaccaggtgggcagatagcagccggtgatcatctcccgcttccacagcagggtcagctcctcctccagcgtgtcgtcaggcagacgataggcgacgccggtggttcggccgccctctttgagagccagcatgcgtcccggctggcaggcactaccgcgcccggcggtcaaccgcaggcaaaacgcgcggtgccagcccggcagcgtgccggtgcaggactcgcgataattgagcgccgggttccagataagcgaaccgtagccaaagatccatactgagccatcatccgggcggcaggccagcgtcgccgccagcgaggctgcacgttgttctgccgaccagagtagcgattcctcaatagcgccaaacgctgtcttacaatccgcattcattaagaaatcacgagttaacactgtttactacctccgccactgcccgcttcccggcgttcgtctcatgcatccgtcaatattgctgaaatattatccagctttatctttcaataagcaatcagcggggcgctggcaagcgaaaaagcggcgtcagcgattattttttcttatgccacttatcatcatcgcctttctcatagctgttcttcaccgccgcccaggcgactttgtgcgccgtctcttcgcggctggcgtcatcgcgccgctcgtctttatctttatattgatcccaggcgctgttaaacgcttctttataaatttcctgcgcatgggcaggcagtacatgctgaacgctgtcggggagttcttgtttactgcgatagggcatactgacctcctgtttgagcattaagtttaagcctggtacgcattcggctggctatcaaggtcaaaatgagtagaaaaattattttagtaattatttgaataataagaactaaatataagtaaacataaattataataaactaatcaagatatccatcgatacccgtaaatttaagtaaaaaaccagcggtaatttagcaagatctgttactttaccgccctacgtttttataattataacacctgcataaatggagatggttcatgacccatgcacatgaggcggtaaaaacccgccataaggagtcttccctcgtctttccggtgctggcgctggcggtgctgtttttctggggcagcagccagtcactgccagtggttatcgcgatcaatatcctcgcactggtcggcattttgagcagcgccttcagcgtggtccgccacgccgacgtcctcgcccaccgcctgggcgaaccctatggctccctgattttaagcctgtcggtggttatccttgaggtcagtttgatctctgccttaatggccaccggcgacgccgcgccgaccttgatgcgggataccctctactccattattatgatcgtcaccggcggtctggtcggtttctctctgctgctgggcgggcgtaaattcgccacccaatatatgaatctgttcggcattaagcagtatcttatcgccctgtttccgctagcgattatcgtgctggtctttccgatggcgctgccgggcgcgaacttcagcaccgggcaatcgctgctggtggcggtaatttcggcggccatgtacggcgttttcctgcttattcagaccaaaacccatcagagcctgtttgtttatgagcatgaagacgacagcgacgatgacgacccgcaccacggtaaaccgtccgcccacagcagcgggtggcataccgcctggctgctggtgcacctggtggcagtgatcgcggttaccaaaatgaacgctaacccgctggaaacgctgttgaccagcatgaatgccccggtggcctttaccggcttcctggtggctctgctgatcctgtcaccggaaggccttggcgccctgaaagcggtgctcaacaatcaggttcagcgggcgatgaatctgtttttcggctcagtgctggccaccatctcgctgacggtcccggtggtcaccctcatcgccttcctgaccggcaatgagctgcgctttggccttggcgccccggagatggtggtgatggtcgcctcgctggtgctgtgccatatctccttctctaccggacgcaccaatgtgctgaacggcgcggcccacatggcgctgttcgccgcctatctgatgaccattttcgcctgaccccgctttcccacccggcggagtccgggcgaaaaaaagcctgccggttttgacgccggcaggcttttttactgatgcagtcaggcttacttgctggtatccagctcgtcgaagcttttcaccagatcgtcaatcgctttcatctgtttgaggaacggctccagtttatccagcggcagcgcggacgggccgtcgcatttcgcgtggtccggatccggatgcgcttcaataaacagaccggcgatacctaccgccataccggcgcgggccagctcgctcacctgcgcacgacgaccgccggaggctgcgccaaacgggtcgcggcactgcagcgcgtgggtgacgtcgaaaatgaccggcgagttgttggaggctttcttcatcacgccgaagccgagcatatccacgaccaggttgtcgtaaccgaagttagcgccgcggtcgcagaggattactttgtcgttacccccttcgataaacttatcgacgatgttgcccatctgacccgggctgacgaactgcggcttcttgacgttgatcaccgccccggtcttcgccatcgcttccaccaggtcagtctggcgcgcgaggaaagccggaagctggatcacgtccaccacgtcagctaccggctgcgcctggctggcttcatgaacgtcggtgatgattttcacgccaaaggtctgcttcagctcctggaaaatcttcatcccttcttccagacccggcccacgataggagtggatggaggaacggttggctttatcaaaggaggctttgaagacgtagggaataccaagcttctgcgtaacggtgacataatgttcgcagatacgcatcgccaggtcgcgcgactccagcacgttcatcccgccgaacagcacgaacggcaggtcgttcgctacgttgatatcaccaatgctaaccactttttgtttcataagttcgccttatcagggtgtaaccggaatggttccagactaatgcaatgtaatttgtttatgcgaaatcgtgttgatctgcgcgcggatcatctcgctgatcggatcctccgggcactgctcaacgaaatagctcagatccaacagcgccacgtgatcgcagtccagctgggcgtatatcagcccgcggtcgcggatctcatacggatcttccggattaaactgcagcagcgcttcgctggcgcgcagggccagctccatctgccgctcttccatcagcgccgacttcagggtgtccagcagcttgcggatcacctcggcgttatccgcttcgtcgagatcttcattaaacagttccgccaccggcccgatgttgcccttcagccatacctccagggtatgctcgtcgagggtctcgccgttaaacggattaatcagccacatctcttcgctggtttccgggtccgcacgcagcagcatctgggtcgggaagatcaccggcaccaccggcagcgccaggcgctgggcgatccacagcaggatcgcgcctaacgacaccgcgctcccctggcggttaaccagcactttatccagccatagcgcgtcggaaagacgatacacgccctgcgaggcgccaaagccccactcgtcgtaaaacagctccagcaatcgttctatctggcgctcctggtcccacgacggcgcaatctcctcctgcgcgaggcgcagcaatcgctgcagctcttcctcgacaaaacgcgacggaaaatcgtcgcggacctgttcagaaatgaggaccatgccatcacacaatggcgctttgttaaattcgaaatccgctaatgaccccatgacctaccccagtatcggtattcttgtgatggcgagttgaatgatgataaacaacaccaccagcgccagcaggaacgcgataaagcggctctgctggctgcgcggacgacgacggcccaacgcgataaaacctaatgcgatgtaaatgataacgccaaacagcttttccgtcagccatgcgccgtcttctgtgaacggcaggtagtgcgttatcgccattaaccccgcgccgctgagaaacagcagcgtatcgctgcagtgcggtgcaattcgcacccaccgctggttcagcagcgggctctggtgatacatccaccagtaacgtaaaacgaacaatcctaccgacaccgccactgtggcaatgtgcaggtagaggacagccgtgaataagttcatcagccaacattctccatgtcgggtaaacgtccgagggtcagacgctcattgtcgccatagtcgcgacaggtcgcgacgtccagatagcccgcttcgcggaacagcgcgcgaaccgcctcgccctgagtccagccatgctccagcagcatccaaccgccgggctgcagatactgccgtccctcgcggatgatatgcgccagatcggccagcccctggtcgcctgcgaccagcgccgtcaacggctcaaagcgcacatcgccttcggcgagatgcgggtcggcggcgtcgatataggggggattgctaacgatcgtggcgaagcgctgcccggccagcgcgctaaaccagtcgctttgacttatcgtcacattagcgatgctcagatgttcggcattgcgcaacgccagcgccacggcgtccggcatcacgtccaccgcggtgacctcacagtccggacgttcgctggccagcgccagggcaatggcgccggtcccggtgccgaggtcgagaatacggcacggcgcggttggcagacgcgccagcgcctgctctaccagacattcggtatccgggcgggggatcagcgtcgccggggagacgaacagcggcagcgaccaaaactcgcgctgcccgaccagatgagcaataggttccccgcgctggcgtctcaccaggagcgcctccagcttcgccgcctcgtcagcagagagcgtcgtttcaccgaaggccaaaatccaggttcgcgcccggccggtaacgtatcccagcaggatctcggcgtcgcgtcgcgggctgtcgctctccgccaggcgggcgatcgcctgctgcagccaggcctgaaaggtcatcattcctgctcggacagcgccgccagctgatcggcctgatgttcctggacaatcggctcaatcagcatgtcgagtttgccctccatcgcctcatccagacggtagagcgtcaggttgatgcggtggtcggtcacgcggccctgcgggaagttataggtgcgattgcggtcgctgcggtcgccgctgcccagcaggttgcggcgcgtggaggcttccgcctgctgacgtttggccacttcggcggcgcggatgcgcgcgcccagcaccgacagcgccttggctttgtttttatgctgagaacgctcgtcctggcactccaccacgatgccggtgggcaggtgggtaatgcggatagccgagtcggtagtgttaacgtgctgaccgcctgccccggaggaacggaaggtatcgatgcgcagatccgccgggttaatgtccggcatttcggcttccggcagctccggcatcaccgccaccgtacaggcggaggtgtggatccgcccctgcgattcggtggccggcacacgctgcacgcgatggccgccggattcaaatttcagccgaccgtaaacgccgtcgccgctgatcttggcgatcacctctttaaagccgccgtgctcaccttcgttggcgctgaggatctctacctgccagcggcgcgattctgcgtaacgggtgtacatgcggaatagatcgccggcaaacagcgctgcttcgtcgccgccggtcccggcgcgcacttccacgaaggcgttacgctcgtcatcaggatctttcggcaggaggagaacctgcagctgttgctccagctggtcgcctttttctttggcgtcacgcagctcttcctgcgccatttcgcgcatttccggatcgtcgagcatcatctgcgcggtttcaatatcctcctgcacctgacgccagtcggtatagcagcgcgccacatcgctcagttgagcatactcccgcgacagcgcgcggaatttatcctgatcggcaatcgtcgcggcatcgccgagcagcgcctgcacttcttcatggcgctcgtacaacgcttccagtttggcaacaatagaagacttcataggcgtgaattcaccctgtcctgaaaataagagaaaggtgcgctattccagcccgaggctgttgcgcagaatatgcagacgttcgtcgtccccgtcacgggcggcctgctgaagagatttggttggcgcgtggatcaggcggttagtaagcttgcgcgccagatcctgcataatttcctgggcatcaccgccctgctccagcgcggccagcgctttcgccgtcagctcctcacggacctgctcagactgagaacggtattcgcgaatggtctcgctggcgctctgcgcgcgcagccaggccataaattcgctggtttcctgctcgacgatcgattccgcctgcaccgcggcagccttacgctgcgccaggttatgctgaatgatgttttgcaaatcgtcgacgctgtagaggtaggcgttagccagtttgccgacctctggttcaacgtcgcgcgggacggcgatatccaccagcagcatcggctggttacgccgcgccttaagcgcacgctccaccatgcctttgccgatgatcggcagcgggctggcggtggagctgataatgatgtcggcctctttcagccgttcgtcgatatcgctgagggctatcacctcggcgcccacttcctccgccagcgcctgggcgcgttcacgggtgcggttggcgatcaccattttgcgcacgtgatgttcgcgaagatggcgcgctaccagctcaatggtttcaccggcgccgaccagtaacacggtgacgctggagagcgattcaaagatttgccgcgccagggtacaggcggcgaaagccacagagaccgcgctggcgccgatatcggtttcggtacgcacgcgcttagccactgaaaaggatttctggaacatccgctccagctcgctgacgttaagatggccgcggctggagtcggcgaaggcttttttcacctggccgaggatctgcggctcgcccagcaccagcgaatcgaggccgctggcgacgcgcatcagatggctgacggcgtcattatcctgatgccagtaaaggctttttcgcaggtcttcttcgttgaggccgtggtagttgcacagccagcggatcagcgcttcctgcaggttatcctgctcttcgacgctgagatagagttccgtgcggttgcaggtcgacagcaccaccccaccctgcaccatcggctgagccagcaagctctccagcgccttatcgagcgtttccggcgaaaacgtgacgcgttctcgcagggcgaccggagctgttttgtgattgatgccaagagctaaaagggtcattgtgagggagtagtaccagcgttgctaaggttagtctgagtgcatcatacaggatgcgcgtaatcaataaaagagaggctccccttttggagtaatagttaaagcaagaccgccattaaggttaattttttgatttcagacaacttgaacgtagacgctatggcccggcgacgctagcattaagggttataaatgtaacctgctacacaaatcggcccgctgttccctgtcgccgtttttccctgtagacatcaaggatttgtcatcattatgaatcgactgttccgcctgctgccgctggccagcctcgtcctcaccgcctgttctcttcatacgccgcaagggcctggcaaaagcccggattcgccgcagtggcgtcagcaccagcaggctgtccgcagcctcaatcagttccagacccgcggggcgtttgcctatctttccgatgagcaaaaagtctatgcccgcttcttctggcagcaaaccggccaggaccgctatcgcctgctgctgaccaacccgctgggcagcaccgagctgtcgctgaccgcgcagccgggcagcgtgcagctgatcgataacaaaggccagacctataccgccgctgatgccgaagagatgattggccgtctgaccgggatgccgatcccgttgaacagcctgcgccagtggatcatcggcctgccgggcgacgccaccgactattcgctggacgatcggtaccgtctgcgtgaactgaactatacgcaaaacggcaaaacctggcacgtgacctacggcggctacaccagcgatacccagccagccctaccgtccaatgtcgagctgaacaatggcgctcagcgcatcaagctgaagatggataactggatcgtgaaatgatgacccgctggccctctcctgcaaaactgaatctgtttttatatatcaccggccagcgggccgatggttaccataccctgcaaacgctgtttcagtttctcgattacggcgatacgttgaccatcgaaccgcgtactgacggccaactgcgcctgctgacgccggtggccggcgtgccggacgaggagaatctgatcgttcgcgccgcgcgtctgctgatgcatgccgccagcgaaagcgatcgcctgccggcgggcagcggcgccgatatcagtatcgataagcgcctgccgatgggcggcggcctgggcggtggctcctccaatgccgccaccgtgctggtggcgctcaaccatctgtggggctgcggtctctcggaagatgagctggcgactcttggccttcagctgggggccgatgtgccggttttcgtgcgcggccatgccgccttcgccgagggggtgggtgaaatactgacgccggtagaacccgaggaaaaatggtacctggtggcccacccgggggtcagtattccgacgccgatcatttttcgcgatccggagctaccacgaaataccccgcgccggtcaattaatacgttattaaattgtgaattcagcaacgattgcgagcttatcgcaagaaaacgttttcgcgaggttgatgccgcgctttcctggctgttagaatatgcgccgtcacgcctgaccggcacaggggcctgtgtgtttgctgaatttaacaccgaatccgctgcccgtcaggtgctggacactgccccggcatggctaaatggctttgtggcgcgcggagttaacctttcgccgctcaagcaggccctgctctgaatcctgcgccgtgatggcacattgataatgagtcagccggggaaattgagttacggtgacaacgtcaccctgttccagacgttgcatcgtgctctttaaatacaccgactggatcgaatggcgccatcccgcacattattggcccattcatccaccactggacgcatgcctgaggttcttctcgtgcctgatatgaagctttttgctggtaacgccaccccggaactagcacaacgtattgccaaccgcctgtacacttctcttggcgacgccgctgtaggtcgttttagcgacggcgaagtcagcgtacaaatcaatgaaaacgtacgcggtggtgatattttcatcatccagtccacttgtgctcccaccaatgacaacctgatggaactggttgttatggttgatgctctgcgtcgtgcttcggcaggtcgtatcaccgccgttatcccttacttcggttatgctcgtcaggaccgtcgtgttcgttctgctcgtgtgccaatcaccgcgaaagtggtggcggattttctgtccagcgtcggcgttgaccgcgtgctgaccgttgacctgcacgcagaacagatccagggcttcttcgatgtgccagtcgataacgtgttcggcagcccaatcctgctggaagatatgctgcagctgaacctggacaacccgattgtggtttctccggacatcggcggcgtcgtgcgtgcccgcgctatcgctaaactgctgaatgataccgatatggctatcatcgacaagcgccgtccgcgcgccaacgtctcccaggtgatgcacatcatcggcgacgttgccggtcgtgactgcgtgatggtcgacgatatgatcgacaccggcggcaccctgtgtaaagcggcagaagcgctgaaagagcgtggcgcgaaacgcgtattcgcttacgcgacgcacccaatcttctccggcaacgctatccagaacatcaaaaactctgtcattgatgaatttgtcgtctgcgataccattccgctggcaccagaaattaaagcgctggataaagtgcgtactctgacgctctccggtatgctggctgaagctattcgccgtatcagcaatgaagaatctatctctgctatgttcgaacattaatcgagcccagcacaaaaacccgctgcggcgggtttttttgtctccgcaccttatttgtatgatcaatgcctccttcacctgccatttagttgacagatgatgcgctcatggatgaaacattattgtgaacagattattttcctcacatgtgatgcctttccgcgccctcatcgacgcttgttggaaagaaaagtacaccaccgcccgcttcacgcgtgacctgatcgccgggatcaccgtcgggatcattgcgattccgctggcgatggcgctggcgattggcagcggcgtgccgccgcagtacggcctctatacctcagcggtggcaggaattgtgatcgccttgaccggcgggtcacgctttagcgtttccggtccgaccgccgcctttgtggtgatcctctacccggtttcccagcagtttggtctggcgggactgctggtggcgacgctgatgtcggggatctttttaatcctcttcggcctggcgcgctttggccgcctgatcgaatatatcccgctgtcagtcaccctcggcttcacctcggggatcggtatcaccatcggcaccatgcagattaaagatttcctcggcctgcagatgccccatgtgccggagcattatctgcagaaagtggcggcgctggcgatggccctaccgaccattaacgttggcgatgccgccatcggcgtcgttactcttggcattctgatcctctggccgcggctgggtatccgcctgccgggccacctcccggcgctgctgggcggctgtgcggtcatgctggtggtcaacttgctcggcggcgatgtcgcgacgatcggctcgcagttccattatcagctggcggacggcactcagggcaatggcattccgcagctgctgccgcagctggtattgccctgggatatgccgggctcaaactttaccctgagctgggcctcgctgcaggctctgctgcctgccgccttctcaatggcgatgctcggcgccattgaatctctgctgtgcgcggtggtgcttgatggcatgaccggcaccaagcacaaagccaatagcgagctgattggccaggggctgggcaacattgtcgcgccgttcttcggcgggatcactgccaccgcggcgattgcccgctcggcggcgaacgtccgcgccggcgccacatcgccggttgccgccgtgatccacgccctgctggtgatcctggcgctgctgatcctcgccccactgctctcctggctgccgctgtcggcgatggccgccctgctgctgatggtggcatggaatatgagcgaggcgcataaagtcatcaatctgctgcgccacgcgccgaaggacgacatcgtggtgatgttgatgtgcatgtcgctaacggtgctgtttgacatggtgatcgctatcagcgtcgggatcgtgctggcttcgctgttgtttatgcgccgtatcgcacgcatgactcatctggcgccggtcaacgtcgaggtgccagacgatgtgctggtgctgcgggtaattgggccgctgttctttgccgccgccgaaggcttgttcaacgatctggagacccggatcgccggcaagcgcatcgtggtgctgaaatgggacgcggtgccggttctcgacgccggtggcctggatgccttccagcgctttgtgaacaagctgccggaaggctgtgaattgcgcgtatctaacctcgagtttcagccgctacgcacgctagcgcgcgccggcgtcaagccgctgcccggacgcctgagcttctaccccgatcgtcaggccgcgctggctgacctgtgatcacccggcggcaggtccctgcgcctgccgcatcaaggatccggtcgcctgctgcagccagctcagcaccgccggcgtcatccaggtgcccttcatcaaatgcggctcctgctccattgcccgacgaaacttctgcaacgtctgcggccgggtaccggcgtaggactgaaacagttcaagccacgcccgggccagcgcctgacccgacgccgagtccggcgctacgccctcccggcacgcctgatgcagcttcgccaccagcgcaggccactcctgtagccggtcaaaatagtgctggcgggtgaacgccatctcttcttcgtcaaggtaccgcgcccagatggccagtttgctttcggcaaagccctcggtgatataggcgatgattgccggcgtgacgccggtctgttcaaccatctgcggctcggcggcatgcatctcgttcaggcgggtcagaaactccggacgcccggccgtatcctgctccaggcgctccatccagcgcgtcgccagacgcatcgcctgcggactgtccgtcgggcagccgctcgccatcagcgtctgcacctcctccgttagctcgcgccacgcctgcgccctctgttcatcctgtgccgcaaacggcagcgcggctaactcctgttgactaaaccaacgatcgtacattttcattaactccagcgtctgtagccaggactccagatcgggttcattgccgctcgccagcgcctcgcgcagcaccaatagtcggtcgcgcagcctgccaacatcgcgtagctgggcgttgagcatatctatctgctgcgtcagcagctcgggcagcgacagcgtttgccgatcgagatagtccttgattgtggcgagcgttagcccggcctgcgccagcgcctttatcatatgcaggcgctgaaccgcggacaggttatagagccgatagcccgcctcgcttctggccgaaggcgttaacagccccgtctgttcataatgatgcagcgtacgtaccgtcagtccggcacgcttcgccagctctcccacctgaattaacatgactgctcctctctgtggccaggtccgctactctgcagcctgacgtaacgtcagggtcaagcaaaaaccgcgcttgctattcatttttgctggcaaccatagcagcacgaaggccaggacggaatgggggcgtaatatggcgggaaaaagaggaagagataaagtgagacacagaaaagcgcatcggcctttagcggccgatgcgggaaatcatgctacggttagctgtgacgatgctggttacgacggcagcgtttatcgtagtggcgcacccaccagtagcggtcgctgacctgctcgtggccgccaatacgggcaccggccagccagagcactgcgccaacgaagatgcttaggattgcgccatgcgcaaagaattgtggcaggttaagctgcggaagctggttcagaatggagtaacctacccccacaaccatcaccaccaaccctaaccccatgagtacgttaccgagtaacgaagcgtttttgcgtttcatgtgtcacctccggactttgggttgccagggaatgtccccaaatcttataggtgtagtatagacaaggtctcttctgcggagtgcgtccacgatcacattagtgaacagcgaatagacaaaaatttacaaataagtctatgaaccatatcaaattctaatgatttagtgagtaaatcatcaatgcgggtattgtctaatagccagaattttgtcaagcgcgcccgcagacagtacactacgcggcagagaatgccccatgcaggatagaaaacgtgaccattaaactaattgtcggcctggccaaccccggtgcggaatatgccgccacccggcacaacgctggcgcctggtatgtggatttactggcggatcgccatcgtgcgccgctgcgcgaagagagcaaattcttcggctacacctcgcgcatcaacctggcgggcgaggacgtccgcctgctggtccccactacctttatgaacctcagcggtaaagccgtggccgcgatggcgaccttttatcgcatcaacccggatgaaattctggtcgcccatgacgagctggatttaccgccgggcgtggcgaaatttaagcttggcggtggccatggcggccacaatggcctgaaggatatcatcagtaagctcggcaataacccgaactttcaccgtttacgcgtcggaatcggccatccgggcgacaaaaacaaggttgtcggctttgtgcttggcaaaccaccggccagcgagcagaaactgatcgatgacgctgtcgacgaagcggcgcgctgtaccgaaatctggttaaaggacgggctgaccaaagcgaccaaccgtttgcacgcctttaaggcgcaataagccgttggcgtgcggcatttttgccgcgcaccgtgtataataggcaaagctattcaattttctgcaatctgttccttgtaacagattgattatccaaagattaaggtgatttaaatcatgggattcaaatgcggtatcgtcggtttgcccaacgtcggcaaatccaccctgttcaatgcgctcaccaaagcgggtattgaagcggccaacttccccttctgtaccattgagccgaacaccggtgtcgtaccgatgcccgatccgcgtctggacaagctggctgaaatcgtcaaaccgcagcgcatcctgccgaccaccatggagttcgtggatatcgcggggctggtgaaaggcgcgtccaaaggtgaaggtcttggcaaccagtttctgaccaacatccgtgaaaccgaagccatcggccatgtggttcgctgctttgaaaacgataatattattcacgtcgcggggaaagtgaacccggcggaagatatcgacgttatcaacaccgaactggcgctgtctgaccttgatacctgcgaacgcgcgattcaccgcgtctccaaaaaagccaaaggcggcgataaagacgcgaaggttgagctggccgcgctggaaaaatgcctgccgcagctggaaaacgccggtatgctgcgtgcgctggatctgaccaaagaagagaaagaggccatccgctatctgagcttcctgaccctgaagccgaccatgtacatcgcgaacgtcaatgaagacggtttcgagaacaacccgtacctcgatcaggttcgcgccatcgccgagcaggaagggtctgtggtggtgccggtgtgcgccgccgttgaagcggacatcgccgagctggacgatgaagagcgtgacgagttcatggctgagctgggcctcgaagagccgggcctgaaccgcgtgatccgcgccggttacgctctgctgaacctgcagacctacttcaccgcgggcgtgaaagaagttcgcgcatggaccatcccggtgggagcgaccgcgccgcaggcagccggtaagatccacaccgacttcgaaaaaggctttatccgcgcgcagaccatcgcttatgaagacttcattgcctacaaaggcgaacagggcgcgaaagaagccggtaaaatgcgtgctgaaggtaaagactacatcgtgaaagatggcgatgtgatgaacttcctgttcaacgtctaatcccactggctggcgttttcgccgccaccgcgcaaaaaaatccacgcagcggcgtggatttttttttacccaggcgacacgctactccacaatatgggtatcttctgccgcctcgtagccatcaacgatctgcacaattttctttaactcagcctcaataaaagccggggtagcgctttccccagaggccgggtgatgaagctccaccgagatgccgctggcggcattggtcagcgacaggctgatctcctgctggccccgcgaggacgaagaacgcccgatatgctgcatgatagccgccgccgccgcgcgcgtatcaacgtctgcgagatgcccccatctcatttcaacatgcccctgctgccctgcctttatcacctgcagcgtatagccgcttcttgccgttgccatgccttttcctccgatttagttgcccgggagtcgcattatcagcccggttttatcagccaggttcgcgcacctgcgccttgccgttaatgactcttttccacataggtctgcatgttttctttggtcactaactcaaacgggatccagacatgagactcgaccttttctcctttaatcagcttcagcgctaccgctaaggccgttttgccctgaccgacggcgtcctggaaaaccgtcacctgaatcttatcgctggccagggctttcagcccgtccggggtggcgtcgatcccgccgatcagcagcttcttctggcttttctccagcgccatcgccgcgccaatcgccatctcatcgttgttcgccgccacaatatcaatcgcttctccgttgcccgtccagttctgcatcagatccattccctcgctgcgggaatagttggccggctgtttctgcaccactttcattgccggatacttggccaccacctgctccacatctttggtgcgctgcagcgcgccggcgtcggtgagattgccgatcatgatggcgacgttgcctttgtagtttgccagcttcgccagcgcctccatctgcaatgtgccagactcccgctcgtccgaaccgacaaacaccacgccgggcggtaacgtttttatcccccggcgtccggttcacatacaccagcggcattttggcctgctgcgccatcttcgtcagctgcggggtgctggcggagtccaccgggtcgacgatgatcgcgtccacgccggaggcgatgaagctctgcacctgatcggcctggcgtccggtgtcgccgcgggcgtcttcaaactgtacgtcgacgtggcgggcttgagcttctttctcaatggactggcggataatagtgagaaagttttgatcgaagtaggccattgagacgccgatcttctctgctaatgccgaagcggaactggccagaaggcctactaacaagatgattttacagtgcttcatagtatgccctcagagatcgaaataaaattttcaatacaactacaaacggtatatttaaatcattttcagactacgaagggcgttcggttcttgcaatattgatgtaaagaaaatgttgccatgcgcacactttatttcaccgcctcactcaccgagggctcaccggttgcggggagcgcagcggtcggcgacgccggctgttttcgcttcagcagggcatactccactatcagctgttgcagatgcagctccgcgaggcttccccgcgcggctggccagggttgatcaacgggaagcgcggccagctggcgcagctgctcctccagcggaacagcgcggttaaacgactgtgtgatggcaaatactgcggttttcagttcgctcaccgtcaggtacttccccttctgctcgtcgagggcattgagctggtcggcgagccgctgcagctgctgcatgccctccgaccagccggtaagattttccgcgggcaatgcgccagcactcagctgctgccgccactgctgcgccagcggttgcgcctgatccggccagcggataagggcctggtggaccagctggtcgccgtagctgaccgcccagtccggcgccaggcgggcaagctcgccaagctggcgctgcgtctgtggcagatcaaccggccccgggggcgttgtcgccggcaggcccggtatcggtccggcattttgggtgaccgaaatgggcggcaagtcggactgacgcagcgccagccatccgccgacggcgatacccgttaccgccagcatggtaaccattccggcgataaacggcttccagcgcggcgcggctgccggagtagacgccgccaccggcgcgggccgctttgcaggtgaaggcggagccagcggttcagcctttggtctacgttttaggtctggcagtggctcaaccttcgccgcatcctcttcgctgaccagagtgccgggaagttccgcgtcagacaccgccaccggcggcgcggtgggaagcgctggcgcagggtcgaggctctcgaagcgagttgccgtgctgtgcagtagcgcccgcaggtcgctcagctggttttcaggagcgatctcaaggtgctggagcactgcgtcgaagctttgcagcgaacgttcagcctgctcaagcgactcaacatcctctggggtaagattcagggtacggatcacctgccgcagccgcttgctcagggtgcggaagatctctgtccgggccgggagcgcctgtggccacaggtttttcccctgacgaaccagcagcgactccatcagcgtcagcccctcattgatccctgccaccccgcccagccgggcgcgggccagggtataccaggcgacagtctgcaggtccgcgccgtgatgctccaacagcccgcgggcaagctgctcggcatacggccagttaatatccggccgcgccgggtggctgagcttgttcatttccgcacgcagggccataaaatcagccagcgtgcgcgggtcgccaccggctttatagtgacggtcgtggtgtgttgtcatcatgatgtctttcagcgagagattagagggcggagcgggcgtcaaggtactgctgacgtttgaggtggcggatcaacaccctgccctcggacataaactccgtgccgtaacgcaccaggccaatatccttcagctccgcatcaatggcatagcgcagttcgccgggcgcatgctgatcgagcatcaccaccgcgatccgctgcaggcgcggttcgtatttcagcaacaccgccgacaacgtgctcatcagctggtgcgccgacgctggcatcccctggaggatagcggtcatatccggcaggccgtagtccggcagatgcgccagcgttccggcccgacagttgaggatgcgctgcatgttatcgagcaccgacaggatgacctgatccgtttcgctgacagtattcaggtcaagcccgccggcgaaattgccgtacaggatgtcatacagggagggacgaggcattttcatttctccttaaacgggtgcagcgtcagttgattttggctggcttcgataatgcgcggcctcgccggatcaagttcgtcccgggtgagtaccagccgccagctgttttgcgtcagatctggatcgataaacatggccgccaccgccacaaactgcgcgctggtttccatgggcatatcgacggtcaccgattcgcccggacgcaggcgaacatctttttccgccacccggtccgcctgcagcgcctggccatcgccggcaaacagcgacgggtagtcagtattgtcgaacgcttgccggtccttcagctgataaatacgcaccaccgtcgccagggaggcgcctttggcgttgttattcacgccttcccgggcgcgaagatccagatgcagggttttcacctgggggtaaaaaatggactgggtcacggaaacggcgccgtctttcacggtctgcgtcagtccgcagccggttaagacggtaaccatgaggaatgccagcaacctggcggagggtttaactgcggtaatcgccatcttcatcgctctccctgcggtggatattttcccggacgcgctgatagcgccccagataaatcgtgactctgtcgtcagcctgtttctgcgcatccagaggacgcagcagagcggtacggccgagctggacggcatgctcctgctggcagcaaagttgcgcatccggcagtaaacggcgggcgacgcaaagctgcagccgcacgtcaagatgagatccgagccagacgtgcagaagcgccatcaggtcgctgaacagttcgccgccgggcagccagccgcgaacctcatcaggcttttccgttgccagctgcagcaatacctgaccgttcacatccgtggcgtaggttcccatcactggcctatgttgcaggctaaccggctgacggacgctcatcgttaacggctgcgacaaggggatccggcagggatcgtggtggtacaccgtcgcccgggtccccggggccaggagcgccaccagcgcctccatgccttccccggatctccccggcagcatcatcaccggcagcagcgccagaaatcgcgacagcggcgctgcggcaacggcggcacatcccggtatgcccagccccgccaggcccagcagatactgcgagatgttgtccgtgccgcccgcccgaaaggttgccgggtaggaatatttgcgccagatacggtaatactgggcgatcagccgatggttaaagatatcgaggaaatcctcggtggcctcgacgccttcccgccgttgcgcaatgtcatcgctatagtgggtcggcagcggggattccacgccgtagagtcccataaaagtcacgcgaaccgccggcggacggggcggttcaggatcgtccattccgcggatttcgccagccggaaagcccatccccggatgcgggcgaaagcgtatgggttcatcacctaatagccagccgctgccgatgatcggcgccttcggatggttcttctccagcaactggcagaagcggtaaaaattcatgtacggcaactgaggccggagctgcgccatcagccgggcaggcgcagactgtgattctctttccaccggatacatttcccttcaggttgaacaatgagcgtcagctggttgaactgattcatatcggcatacagtgcgaaaaagcggttgagcatgtcgccaaacaggtggacatcgcccgcaccggtaaatccgctaccgtcgagcgtcacttcgatatccagcccgcgcagcaggaagccctgctcgaaacgctgaattcggtgatggctgaccgccagaatggcgtccagacggcgattattaagctcatcctcccgccagttgtagagcgacagcgtgccgcgcagcacctcggcgctgctcatcatgttgagaaaacgggtgcccagatggctcatgacccgccagtggtagcggtcttccgccgggggataggccggcagcgtgggcttacagagattgcggacggtaagcggcgtggctgatatcgactcacagcgatccagcagcgtgctctgtagcgcccggcgcggcagctggccgttagtgccggtgatgcgcaaggagaccgtttcccgcgccagctcccggtcagcctcccattgctgtccgccgaggataagccaggtatcgtgcatgccggttacgccccgttttacgcgggtgtggtagtagcgctccggcgcatggcgacgcatcattcccccctggtgacgaaagcgggtgaaaggcacatagcgtgcctccccggtgcgcccggagccggtcacgctgtcaacagaatagatttcggtatgcccgtcctgcaagcgcttcggacgcaggaggtattcgctctccagcccgctgatggtcaacggatcggcctcaagggtaaacaggttaatcaccggcacacagtgcaggcgcaggctgcttgcgctgacgggtaaatcactttgccagacctcgctgaacaccacctcaagcgtgaaatgcgatatccccgccggcagggtgatgttttccaggccatttagctgcacgaacataaatttttcgcgaaaggtgaaatactcgagcagcagctgatagccgctgaaagcgctctcccccttcggccataaacgatcctcctcgctgaatccccccggggaaaaatagccgtcgaggcttacccgctctgtctgacccggcagacgcaggtacagcgcggcctggcgtcgggtcagccacagatggagggcgctgccggtaacggcgtcttcccccaggtacagcgccaggcggcggagatcggtctgcgaccagtcagccagctcgctacaggcgaatcgtagtcgcagggccgaacgtccgtccggctccgccgtcatcaccgcctcctctatcgccagcgggttaagcgtcagatcgcgggtggttcggtaccggcacacggtatttttcggccccagtgggcgggagctaatctcaaacccggcgggcaccgtttccgccatcttcatcgccggcagcgttggggtcagcgccacgatcgatagcgatggaatagtgcgcaaatagtgcggccacagcatgctgaccagcccctcggtcagctccggcagatcatcatcaattttttcgcgcaagcgacctacggaaaaggcaaagccttcaaacaggcgctcaacgtaagggtccggcgtaccggctttatcgagatccagcatcgccgcccgatcggggtgagcctgcgcgaacgcttttgccgcctcgcgcaggtagcgcatttcagcgtcaaaatatcgcagggttaaatcgtccattatgaatattcccttattcgtctacagggagacacgcagcatggctgcgcggtcagattagttggccgtcgggcggccatgagcgaaggaggcctggcgttgcaggtcaacgccaatcagtgagggagaaggttcagtatccctcttcgccgggtatatcgtcggtcagcggaacacattcagcagacgcgcgcacgctgaatatcgtctccggtagcgtaaagtttcgcagcgccaacagcgccagcggtccttcccccgcctcggtacgcagcgtgtagttcagcaacagaccatccggcgctttccagctcaggctccagctgctgctcgttccgggataagcgctgaccaccgccttatccagcagacggatccacccccaggcgcccgggaaatcgccatactggcgggtgcccgcccgggtactgacccagctcagactggcgcccggcgcttcggtgtcagcgggccagctgaaccgccgccagaccggcatctggttcatatagacaagtttctgactgtcaatgaccagctccgtctgcatcacgccgtccgccgtgccggggcgaagcgcaaaatgcaatcccgcttcgccgttggcgaacgcgacgtcggagagatggctcagggtattcatcgcctccagaaaggccgggttaaacgtcagcccctgagcattgatactgtccgccatccagcggctcccctctttatgcagcacgccgttcagccgggtctgcagaaagcgggcgatgcgcccggtctcgctgtcgaggtattttgccaacagcggcagagagacttcactgctggtatttttaaaggggtagcggccgccaaaggcgctattccagtcctccaccaccgcgctgcgccactgggcgttgagactttccgccgccggggtcagcacctgctgccaggcctgttccatcgggcgaacaaaaagcgtttgcccaaatccactccactgctggcccagccccgccgccaccaggctgccgtagtcgcgcgtttcggttaaatccacggccttgccctggaataccgtctgcgcaagcaggcgggtcatcgcctgcgggtcggtggcgttggtgacctgctgcaggcgcagacgcacctgggtgatgcgggtcaggaaggtctgcaggctaagacggctggtgggcggcccgccgtcgcgattgtccagcagcgccagcacgggtccgaaggtggcatccagaggaccgcgcgcgccggaccgttgatcgatgacgggcgagttatcacggttaaacagctgcctggccgatttgaccagcgaatcggcgatggcttccccggtctggccggttcgcccctgcacgctcagggtgttcatcagcgccaccagcggcgactggcgcacatcggccatcagggtcagctggtcgatagcatcggagagggtcgccgcgcgctgccagcgcagactgttgaggaaatccagccaggagccgctgaaatcagcgaaataacgctccgccagcctggctcgcagagcttccggcgacgtcgactgcgcggcagtctgcttcgtatcgctcaacacccagtccatttcatcgcggcgttccgcgaccactttctcaatggccggctgcacggcctgctcccaggcctgacgggtaaacatgcccggcaccacctcatcagtgctgaacagacgcgaagcatcggtgtcggcagtcatatccgccaggcgcatatcggcatactgattcgccacctgcgcgagcatcttctggtaaagcgtggactcactgttgcgctggcccatctgtcgaattaaccgtgtgcgcacctggctgaccagaccatcatcgacaggcagacgccactgcggatgcgacaccagactggcggcataaaatgccagcagcgaagggccgctgccctgccagacggcgtcggcgatgcctgagcgctgcggccagtcctgcattagcgtagtggcgaaccacgcggcgtccattttttccgggcgggtcaacatcagatattgtttcagttgtccgtaagcggtcttcgtcatcttctcacgcagtgggctgtccggcggcagctgcacgaaggcggtgagctgctcttccagatgatgcgccgccgcatcgcgcagcagcggttgcgccatctccccgtagcgcggaaacagcgccgccagcaggtcatcattctggctgagaccgccgcgggcataccacggcgcgccgtgctgcgagcggtattccagttgagaaagcgttttctgtaacgcggagagcgcatgcaggcgtacggccagcggctgtttctccgctgaggccagccgcacctgctcctgtgcgatcgccaccaggtggcggttggcgataaaagagactgtcattgaggcggcccagagtaacatcagggcggcggcggccacgctcatcccacgcatccagttgactccctgtttgcgcggacgtagaccggctggcaaccacagcactgagtctggtatcgtttcccagcggttatcccgtccccagtgatgacggacactgcgaccagcctctactgacgcctcactaaataccaccccggccatcggcaatggtcggtatggattaagcagtatcgataacggttccaccaccgcttccgcttcccgagtcaactggtcggccagcgcgagtaaaaaattgtgctgtggttgcccgcatatctgctggatgccctgctctatcagtaacgacgccagggcagtgaactgttcggcaactatttgcggcgtacaacctgcaggtaacaggcagcctacaggctgagtgatacgtccatttttttcgttgcccccctcatacagcgaccagacgtataggggtagtttccagccaatagcttcgaagcgtagctttagagagtgagacacactgtccatttcatctggcgtgagcctgggcttcgttctgttcatcgttgtcaaaacgccgtcaaagcccgatgttatccacaccataccatcagccgggcgataacgcagtttacgcagcgctgtgaaccaggcgttatctaccgctgccccagggtctccaccccacagcaataatgtaccttgatcttcctgccagagttcctgcgtgagctttggggtcagttgttctacgtctctgactgagccaattatcagcagaatacggactttgcgggaccaggcgcgtccatactgatagcgtagagtctggcgaatttcccccaccgtaatatgatggggaggtgtcagcgccacgcgcccttcttcgccgggtaagacgctggcctgctgcgactgccggcgatataaactctccttcacacggcgggacattgcaggaaggtaaaaaacaaataccaacgccagacagacctggacaaacgccagtacctgctcgccccgcgtattgatattcagcatgccgccatagcgggtgatcccccaccatattgcagccatcccggccaacgtaagcccggccaagccaaaccggcccaggccattacccggtataatcatcttcactccctggggtgatggtactgataaaatgttcctgttcgctggaaaataacgccagcaggggctgtttacggaggctgaccagatcggctgccagcgcggtcaggagccagggcgctgcgggtcccggaataccgcaccatttttccagcagcgcgatatcttcagctttccatggggtatgcattttgccgccctgcgtgataagcgcggcgcttctttccgtccatttttttgcgtccccgataacggagggcgtctggcaggctacagtctgggtttccagaaacagggtgatatcgtcttcaaagttcgtcatatctaagggcataggacgtaacagccgtgatgagtgcggcagatggtatttttgcgccacatcatcgctggtcagcagcagcacggccagcccgtcggagtatgctgtaccaccgttgagctggatgaccaggagtaaattgaccgtcagtacaggctgcttcaggcgctcctccacttccgacagtgagaatgagccggtaacggtaatatcatcaggcacggcgcggccaggaatgtgttctttccagagattactgaaactgctggtcagctcaggcgagggattatccgtgatcagggtgacatacagcggtagctcttccggcaggcactgcacgcgctcttctatactggtcagcagcgcatgcatcgcactcaactgcacgggctcttctaccggaaggtaattaatcctgcgggcaagtccgtattgctgaggccgctcactcccccaatgcgccgcagaaatatgatccggcaacagcactgcactgctcagaacggccagccagcgcccggcccagtcttcccacctctgctgtccgtattccgcctctttcagcaagaactgatgcgctttcagatccctgtcccacaggtagcaacgcaggcaaaaaatcagcaaccagcatcctgcaggcatcagggatacccaccagatatttatcactgagataatttttacggtgccggaggcatggaggataaagagcaggacaccgataatcgccatcagtacaccggcaaacagccatcgggtcagtgaaggagccgatggctgctccatggtcaatgcttttgtccgtacccagcccattttttatcctatcgcgcattccggcgcgccggaaatcacctggcaaccgcactgacatttgcagccatcgaccacgatggctttaccatcggaagaccattccggcgctccctcaataatggcattagtgccatgtcccggaatcgggcagctgactttatcccccaccagcgctacgggctttccatttacaatcatggtggaggatgcggaaataacagcaccgccgtgcgtggttttatcgtcgagtaatacgaaacctttggacattgaatttccttttatatatcagcgatacagtaattattaattagaatactcaatcgcatctatttcaacctaaagagtgaggcaataacatttaataacagataaaaaccggcgactcctgtcaaaggaagaataataaacataaaataatatctggaatatctgcacacctctctttacttaatacatacttcttcccccaggtgatatcccctacattaataatttgtcacttcgaacgccaattgccagacgaccttatactcgtgaaagtcgccttaatttctattgcatgctctatacaataaaaaacatactaacaacaaaataatcagaattataagcaaataaaacagacattttctgattaggtggcaacagtgggtatacctcgctaatatgacgactattgctccctatcattttgcgttcgccataacctatgggaaatccaaatcgttcgcgcatccatcgctgcgtcattactggttcaagactaaaaggcagcggattaggaaataaccaagccgttttattttcatcttctaaccgcaaagtcacttcctcaagattttttctggttatttataaaagatgaaaatattctttctcgcctcatatccagcctgaaaatatcatcactaacagtaatcgttggttttgttttgtagggaattaaaccttgttcataaatatcctgataaggtttacctaattgcttcacaagtgttcgatatcaatattcatttgccaccaagtcgctttttatcaagcgcaatatgaatctcctttgctcgctccagtggataaaaagtcacggtttctgaaaataaatcattgttataggtaaatccgacagaactattttgatgaggtataggtaaggtatatatctcttcccccctataagcagtcataacaatttttgcttcaacgtaaaccatcggaaatcctagataagcccgcacccactggtgaatcataactcgttccagaccaaacggcataggattaggaaacagccagtcagttttggcttcatcttcaaaccttaacatttcttctttcagatttttaatgagcaccaccttttccgttgacaatcatcgttgatgacgatgaaataatttcactactgtacatgattttaccatccattagaaaaaaaccttatatgttgaacgccaccgattttttaaaataagatatagcatcacacattatttattaacgacacaacgaaatacatactgcggaccaacaccatatttttcatagtcatcgtctttactaatctttggcaccggcagatctgattgtctgaacatggttaaagcgtactgtctgtcgccgccaacattcccgcgcaggacttttttagtaccctgcgcagggccctgaggatcgtttaccggagaatgagagtaataatctgctgcataccagtcattggtccattcagagccactgagtcccatatcatacagacctaaggggtttggcgggaacttccctaatggataaaaaggaagcccaataccatcagtataactatccagttcgtcctggttcgggaaattttccccgggtaaaagctcaccattgttggtagcaaacggaagatactgccctctggatcttgctgcatactcccattgcgcctctgtcggcaaatcaatttttttaccggactccttacctaaccactgacaatagtcttttgcctgttgccaggtcacatttgctgaataatcatcggataataaagatggataatttttcataaatggacctaccggcagtgctcttttattagtaagttttgaatactctctataattcttattgctaaccttatattttgatagtaaaaaatcacttaacacaaccttatgtaataccttatcatcctggtttatgctgaaaggcagtttttcaccgactaatgggccaaaatcccccattaagaactcgccgcacttaacgggaaccatgttagaaagcgacttagcaacaagcgcttcagacaaggtttcacgcttgccagtactcttctggtcgcacccgagcagtaaactggcggcaacagtagcaactacgattaattttctcatcttatcacctaagcctttgcatcaggcagtcattgtccccgtcgggtgctggtcgtcgatcatggcaacatattctgacatcaggctatccgggacaggttttaatagtctctccggtttattggaacattcattcaacgttgttgctccggttaaaatgatatatgtcaccaccaaacgacattatttattgatgacgcaacggaaaacatactgcggaccaacaccatatttttcataatcatcgtctttattgatctttggaactggcaaatctgattgtctgaacacggttaaagcgtattgtctgtcaccgccaacattcccgcgcaggactttttcggtcccctttacgggtccctgaggatcgtttaccggagaatgagagtaataatctgacgcataccagtcattggtccattctgagccactaagtcccatatcatacagacccagggggtttgggggatatttccccactggataaataggaatacctgctccatcagtatattcactcagctcatcctggctggggatgtttttaccgggcaggaactcaccattattcgttgcaaacggaatgtattgccctctggatcttgctgcatattcccattgcgcctctgttggtaaatcaaattttttaccagactccttacctaaccactgacaatagtcttttgcctgttgccaggtgatgccaacagaataatcacctttttgcaatgatgagtaatcttttagcagaatattaatgggtggtttttttactcctgttatccgcagatatttattataatcatcattggtgactttgtattttgatattgaaaaatcgcttaatacaaccttatgtaataccttgtcatcctggtttatgctgaaaggcagtttttcaccgactaacggtccaaaatcgcccattaaaaactcaccgccctgaacgggaatcatgttagagagcgacttacccacaagctctttagccgctttttcactcctggcagcatttccctgatcgcacccgaccagtaagcatacagtaactgaaatagctataatgttattttccatttcaatgcctcagtaatttaatcaagcaatcattgtattagttggatgctgctcgtcaaccatggcaagatattctgacatcaggatgtctggaataggtctaaatggttcatccgggccaacggaaaccggaaggttattatgcaataaggtgagcttttcgccataattggtatagaaaaacaattttcgttctccaatgcctaaaaacttaatcacatctttttcattcagttctttactgcctttcttctcccctggcgacaacgtcaaatgctgcatgatattgttataatctgcctgactttgtacccacttcaatgccataaacaccgcttgttttcgtctctttaaaggaccgagcttccagctgttaacggaaaaaaatcattattctgatttcgtggatcaagccagtccgcccagttctgatcaattaatgtggcaatcactgccccttttgtttccggaggggtatatttaagctgatcaggattagacaaaatactgtccatcaaattaacgcgtttgttttcatccttaagatctgctctaatttgttgcaatattacgaccatattcttaagcatggcctcacccacctgtatcccttgcgccgccataataataggaattgcacataaagatcgaaaggcatcccctgccatcatctgctcaagcttctgataatccacattcctcagcatatacataaagctcttcataaaagccgcaaagctgctgccatcaacttcaaaaccgacttcccctttggcccccactccccaacataaagccgctttacagtaaatacgaaaacgtccctgaatataggtgatataaaaaaacccacttcccccagcgcctgcctgcaccgtcatccctgcttccagtttggctatcgcggcaaacttcttctctttattgacaatgggtttgttatctttctcaacatctttagctactggcgtatcatcaggatgcgggtcaaaccactcaatggcaccactgatattacctcccgcctgagcaccaacaaaaataccaatttcacctcccccctgtgcttcaggtatcgttgaggtctttaaattcacctgctgctgtcctggtaacggtggggcagtcagggttgcaggacggcctttaatgccatagccctttcccatttctccactccagtctactgtcacccctaattcaattgcagcactggcaccaacgctacctgacaataccagtttcatggcaaaacgcagcgctcccatattacagacaccatccggtgtctgtggagtcacttttttcgccggaaataaaaggctgacacctaacctgtccggcaggtacagggccgtttcggccttcgcctcccccagtgcaaaactggcatgaccttctatttttccctccagttttttttctgacggattatattccgctgatgcaccccctccatggctgtagcgcatcagttgggccagtgcgctaatgtcaatatactgatggattaggaaatagccagttggttttactttcatcctcgaatgtcagcgtcacttctttaagtttttttcagatcattaataaacgctagatatattccctcacgtttcatatctaatctataaatatcatcactaaccgtaacacttggttttgtttcgtaggggactaacccttgctcataaatatcctgataaggtttacctaattgtttcacaagtgtttcgacatcaatactcatttgataaatacaccacacgtccttgtatcctgctagtactatcttcattgcgcaaggaaatggtccagctatgagcgaaccattgcagaacaattacccacccaacctttttatctctaacgcggcttgtatttctttggctcgctcaattgagtaaaatgtgactttttgtacaaaaaaatctttgttataggtaaatgcagcaacgatatattgatgaggggccggcaaagtataaaattccttcacaccaacataaatagtcatgattatctgcgcatcagtgtaaatcattggatgaccaagtttggcccttacccatttctgggtcattacaggttcaagaccaaatggcagcggattaggaaataaccaatccattttattttcatcttctaaccgcaaagtcacttcttcaagatttttttcttggttattgataaaagataaaaatattccttctcgcctcatattcaacctggaaatatcatcactaacagtacccgttggttttgttttgtagggaattaaaccttgatcataaatatcctgataaggtttacctaattgcttcacaagtgtttcgacatcaatattcatttgcgaccaagtcgctttttctccagcgcaacctgaatttctttggctcgctccagcggataaaaagtcacactttcaacaaaaaaatctttattatagctaaatgacgcaactatattttgatcaggagctaatagcggataaaactcctttactcctctatagagcgtcataaccactttcgcatcaacataaatcatcggcaacccaaaacgcgcccgtacccacggctgcgtcatcacaggctccagaccaaaaggcatcggattaggaaacaaccagtcactcttgctttcatcctctaacgttaatgttacttctttcatttttttttcaagatcattaacaaatgctaaatatataccctcatgcttcatatccagcctggcagtattatcactaaccgagccataaggttttgttttataattaatcaaacctttattgtaaatttcttggtatggctttcctaattgctttatcagtgtttcgacattaacattcatttaatataaccccacatttcggtttaacttatgtagttttgctctgatctcttcgattttctcgttactcataccatattcattcttaaggcattcagcattcgcatcccagttggcattgacggcagcttctaagtcacgagcatctagctcttttttagttatcatctcgccgctttctgtctctaccttacgattattacgcccgccataggtttcactacatttttgatgaacagctattggaatagcaactgaagcaaccttatcaaccatcttatctatatatttacttccctcatcaggatataaatcctctaaatatacacgaaccgcatctctagatggaatatgatcgacttgatattttccctgccttgaacggccttcaaaattttcataatagtcaacctcatactcttccacaggggctttcttaaaatacacatagattgccgggacaacccccatcgggtcaacaataataaagtcatcgaaatcccggtcttcgatgggcaatgtttcaatatttggttcctgttcctccgggatcggcgttcccggtacgggcggtaacgattccggggccgggttaggcaacccccagatgctccgcggttccggaatgggtgtaggcggtgtggtagagccgccagcgctcccgtcatgaacagtcgtctggctggaaccccactcaaattttccctgcccggcagaccgggaccagacaaatgtgcctttaattgaaggatcttcaaaaccccatgtctctttatccagctgttttgcaaaccgcacccggacccgatccaacccgcttttttcccccacctcatagctgcgggaaaccagttcccctgactcaggatcttcttcaatacgaaagcgtaccctcgtgcgcactgtgccgttttgtcgggctatttcccggagttcatattccgggacataatccccctcaatgaccgttgaatttacacgggtaaaagcgcccaccatcatctggccatggatcagattctgatagagctggtcgccacgtatattttgtagcgtttccgtctcaccttcattcagtgacggagaatagaagatagccagcagagcaacggtgaggggattaggcgcagccagcacccgtgcgcccgcgacgccttttccgacacctgccgcagtccccgcccccaatgaaagcgaatttcccagcgttgtggctgttggccctgcataataaccactcattgaggcggccagcgccatcgattcaaaaaatacctgtgcgggtttacgttcaacaaccggctcttttgcggctgatgatgtttttccctctccgggtcccagtatttgtgtcatcccggctttctcctgtccatggctcacagtagctctatttttattgactcaggcaatgcggtataaacgctggccgttttcccctcagcatctgcccggccttcgaataccgggcctttttcagtggtgatgcggtaacgggcaaaaagaacaatttcatcggtcttatgatcacattaggggagcagctcttcttaagaatgtggtcaacattgcgggaacagtacagagatcagggaatatgaattagctctgtaaaaaatcatcatttacaagcagtaaaacattaacgcttatttattcattaatctatttcgctctgacgcagcctgaattgcttctgcatgcgccatagaataaaaagtcacactaacaacaaaaaggtcggcgtcataaacaaataaaacagcaatattctgattaggtggtaacagtgggtatacttcactgataccacgactgtaactccccatagttttaggctcgccataaatcattgggaacccaaaacgctcacgcatccagttttgagtcattaccggttcaagattaaaaggcattgaattcggaaagacccagtctgttatgtcatcatcttctaatgttaatgtaatttctttgaaggttttatttttatcattctcgaaagagaaaaacaatccttctcgtttcatgtctaatgtagctgtatcatagcccgctgtggcagttggttttgtcttatatttaattagtccactatcataaatttcctgatgatctttacccaattgtttcacgagtgtttcgacatcaatattcatttgccaccaacatatccagataggcttcattttcatcaaccgggccatgcagtttattcttatagggaatcaattcttgctcaactatttcctgataaggtcgactaattttcttaataagctgttcgacatcaatactcatttgataaatacaccacacgtcccgacatccggctaaatactatcttcatggagcaagaaaatggtccagtcatgaccggaccattaaggattcattaactctctaatcgttttttctccagtacggcctgaatctctttggcccgttccagtgggtaaaaagtcacggtttctgcaaataaatctttgttataggtaaatgcggcagcgatatattgatgaggagtaggtagagcatagacctctttcacccccatataaatagtcatgatgatttccgcatcagcataaatcatgggcaacccaaagcgctctctaacccacaattgggtcatcaccggttccataccaaatggcatcggattggggaatacccagtctgttttgcctttatcttctaaccttaatgtaatttcagtaagatttttctcggaattattggtgaaaaccaaaagaattccttctcgtttcatatctaattcagcttcatcttcatcaataggaccgtaaggctttgttttataaggaatcaacccgtgactgtaaatttcatgataaggcttacccagttgttttaccagtttttcgacgtcaatgatcatttgccaccaagtcgttttttctcaagtgcagactggatttctttcgcctgttcaaccggaataaatgtgatcctgttaacaaaaaaatctttattgtaagaaaatgccgctgcaatattttgattcggagtcggtaaaatatatgtttcctccaccccgacataaatagtcataatcacgcaggcatcaacgtaagtaatcggatgaccaaatcggtctcgtacccatcgctgtgtcattactggttcaagaccaaatggcagcaagttaggaaataaccagtcagttttattctcatcctctaaccttaaggtcacctccttaagatttttatcttgattattaaaaaatgataaaaataccccctctcgtttcatatctaatctataaatgtcatcactaaccgtaccacttggttttgttttgtaggggatcaatccttgctcataaatatccagatacgatttcccaaggttctttatcaacttctcaacattcaagctcatttaatataaccccgctttccggtttaactcatgtagtttggccctgatctcttcaattttttcatcacttacaccatattcattcctaaggcactcagcattgacatcccagttagcatcaactgcagcttctaaattactggcatctagaactttttgagtgactaatcctccgtcttgtgttctaaatttactattgtttttcccaccataggtttcactacattgccggtgtacttctatcggtatagcgacagcagccactctgtcagtcatttgttctataatgtcatctttcaggtttggatatgtccctttcaaatatatcctaacagcttcctttgaaggaatatgatccacttcatataggccctgccttgaacgaccttcaaaatttccgtaatagccaacctctaaatctctaactgaagctttctgaaaataaacatagattgccgggacaccccccatcgggtcaacaataataaagtcatcgaaatcccggtcttcgatgggcaatgtttcaatatttggttcctgttcctccgggatcggcgttcccggtacgggcggtaacgattccggggccgggttaggcaatccccagacgctccgcggttccggaatgggtgtaggcggtgtggtagagccgccagcgctcccgtcatggacagtcgtctggctggctccccactcaaattttccctgcccggcagaccgggaccagacaaatgttcctttaattgaaggatcttcaaagccccatgtctctttatccagctgttttgcaaaccgcacccggacccgatccagcccgcttttttcccccaccttatagctgcgggaaaccagttcccctgactcaggatcttcttcaatacgaaagcgcaccctcgtgcgcactgtgccattttgtcgggctatttcccggagttcatattccgggacataatccccctgaatgaccgttgagtttacgcgggtaaaagcgcccaccatcatctggccatggatcagattctgatagagctggtcgccacgtatatcttgtagcatttccgtctcaccttcattcagtgacggagaatagaagatagccagcagagcaacggtgaggggattaggcgcagccagcacccgtgcgcccgcgacgccttctccgacacctgccgcagtccccgcccctaatgaaagcgaatttcccagcgttgtggctgttggccctgcataataaccactcattgaggcagccagcgccattgattcaaaaaatacctgtgcgggtttacgttcaacaaccggctcttttgcggctgatgatgtttttccctctccggttcccagtatttgtgtcatcccggctttctcctgtccatggctcacagtagctctatttttattgattcaggcaatgcggtataaacgctggccgttttcccatcagcatctgcccggccttcgaatacctggcctttttcagtggtgatgcggtaacgggcaaaaagaacaatttcatcggtcttatgatcacattaggggagcagctcttcttaagaatgtggtcaacattgcgggaacagtacagagatcagggaatatgaattagctctgtaaaaaatcatcatttacaagcagtaaaacattaacgcttatttattcattaatctatttcgctctgacgcagcctgaattgcttctgcatgcgccaaagaataaaaagtcacactaacaacaaaaaggtcggcgtcataaacaaataaaacagcaatgttctgattaggtggtaacagtgggtatacctcactgataccacgactgtaactccccatagttttatggctcgccataaatcattgggaacccaaaacgctcacgcatccagttttgagtcattaccggttcaagattaaaaggcattgaattcggaaagacccagtctgttatgtcatcatcttctaatgttaatgtaattcctttgaaggttttatttttatcattctcgaaagataaaaataatccttctcgtttcgtatctaatgtagctgtatcatagcccactgtggcagttggttttgtcttatatttaattagcccactatcataaatttcctgataatctttacccaattgcttcacaagtgtttcgatatcaatattcatttaccaccaagtcgctttttctgtaacgcgacctgtatctctttggctcgctccaaagaataaaaagtgattttttttacaaaaaaatctttatcatatgtgagcgctgctgcaatatgctggttgggcattggtaaagcgtaaatttctttaacccccatataaatagtcataacaatctttgcctcaacatgaaccatcggcaagcctaaattctcacgagcccactgctgggtcatcaccggtttcagaccaaacggcatagggttaggaaataaccaatctgtcttaccctcatcttctaatcttagtgtgacttctttaagtttcttttctgaatcattaacaaagactaaaagcattccttcacgtctcatatccaggtcagcttcatcttcatcaataggaccatggggttttgttttataaggaatcaatcctttctcaaaaatctcctggtacggttttcctaagtgttttataagtgtttcaacatcaattttcatttagtacaaccccactcttctgtttaagtcatgcaattttgctctaacttcttcaattttttcatcacttatgccatatctttctttaagacacttagcattagcattccaattcgagtcaacggcaaattctaaatcacgagcatcaagttcttttttagatattgtctcaccattttctgtttctatcctactattattacgccctctgaaggtttcactacagtcacgatgtacatctatagggatagaaacgactgcaaccttaccaagtaatttttttatatcatccttttctgcttcaggatatttattaatcaaatattctctaaccgccgcttttgatggtaaatggtcaacctcgtacattccttctcttgacctcccatcaaagtcgttataataaccggtttctagaaatccggcaggagccttcttaaaatacacatagattgccgggacaccccccatcgggtcaacaataataaagtcattgaaatcccggtcttcgatgggcaatgtttcaatatttggtccctgttcctccgggatcggcgttcccggtacgggcggtaacgatgccggggccgggttaggcaatccccagacgctccgcggttccggaatgggtgtaggcggtgtggtagagccgccagcgcccccgtcatgaacagtagtctgactggatccccactcaaattttccctgcccggcagaccgggaccagacaaatgttcctttaattgaaggatcttcaaagccccatgtctctttattcagctgttttgcaaaccgcacccggacccgatccagcccgcttttttcccccacctcatagctgcgggaaaccagttcccctgactcaggatcttcttcaatacgaaagcgcaccctcgtgtgcactgtgccattttgtcgggctatttcccggagttcatattccgggacataatccccctgaatgaccgttgagtttacacgggtaaaagcgcccaccatcatctggctatggatcagattctgatagagctggtcgccacgtatattttgtagcatttccgtctcaccttcattcagtgacggagaatagaagatagccagcagagcaacggtgaggggattaggcgcagccagcacccgtgcgcccgcgacgccttctccgacacctgccgcagtccccgcccctaatgaaagcgaatttcccagcgttgtggctgttggccctgcataataaccactcattgaggcagccagcgccattgattcaaaaaatacctgtgcgggtttacgctcaacaaccggctcttttgcgactgatgatgtttttccctctccggttcccagtatttgtgtcatcccggctttctcctgtccatggctcacagtagctctatttttattgattcaggcaatgcggtataaacgctggccgttttcccatcagcatctgcccggccttcgaatacctggcctttttcagtggtgatgcggtaacgggcaaatggcacaatgtcaccggtcttttgatctttgacagtaaaacgcccttcgaacccttcaggcagttccagcggaggcacccgaaaatccgccttacccattttctgcacattggccgatttcagcagaatattcccagggcagcccagctcgatattgccaccacttagcctgatatacgctcccgcacaattcaccaccagttcctccgccgccgtgatttccactcgcccttccacgctggtcacggtgatatcctttttcgccgtcgcctccagcgcatcatcctgcgcctggatttcaatctttcccttcgccgcaaacagcttcatccccgcctttcgcgccagcaggctgacggcttctcccgccgccaccgtaaaacgtttcagcgcactaatgtccgtattctgctgtgacacaatccccacgcaggcgctacccgaagacaaccgtaccgcctgcggactgctgatgctcacgccctgcggcgcattcagcactatccccggctgcgccagctctttcagcgcatcgttcagcgtctgctggttgccggtatccgatggcagggcctgagccgattccgctgccgacgccaggcttttcgcaatacccagggcattttcaagctgcgcaatcgcctcctccattgccagcatcctgtcgcctgccgaaggctgtttatccgcactgataaacactcccgcaccgccccggatgctcacccatttatccgtacgcagttccgcaccctcgccccgcaactccctttgcgcattcacgttatgccccaggttcagctgcgtcttgccgccgtactcggtgctgagcttgatatgctcctcgccgcgcttgtcctccattcgcagcttattattggccggagtacgaatcacattgcgggtgctgtttttctccgtcacaggatcgacatgccgcgagtcgtgcagcgcatgcgcaatatacggccggtcagggtcgccttcgtggaaagcaatcgccacctccgtgccctggatcagcgggaagtgaaaaccgtacacgtcgccgccgtagggtttggcgagacgcaccggcatgctttcctgaccctgccctttctcatctctgtcagggtcaaatttcacccggtacaggccggacgcatcctgccaggcgtagatatcattcgctttcgcgctggtcacccgcgccgtcatggtgccagtcaccttcgggcgcggcagcagcggcggacgccagcacaatgtttcgctgtagggcaccgcaagcagggacacccgcagcgcctcccggcggctggcggtaaaaccggtgccggtgattaacagcggatcctgtacgggcgcaggcagggtcgacggcaggctgtcggtaacggtcagcacctgggccggcgccagccaggctgcagtactgatcgcggtaataagcgtctggtgagccagaaaacgctcatggtcgaggcgggcatagaagttggcggtctccgtctgcgggtcgattttatcgccacgctcccggtggcgaagcttatagtggtatacctcaccgtaagtgatgccttccccatttccccgggtcatatccgctgttgccgactggagaacgctctgcgcatcgcgggggttataatcccgggtagtgacgttcgcctctacgacattgtgcgtgatgctcagaccccatatcgattccgtaccgctgtcgctcatcccggacgggctgtttacaggaagtgttttatcgaacatcagcgcccgctgcgcgtcggcgaagtgaaccacttcgctctgcgcctcttcctgcagggtgaagaaataaaatatccccacctctgccagcaggcgctggataaatgccaggtcgctctcctgatactgattaatttgctcgcgccgcggatagtgttgcttgagattaaactcatactcccagtcatgcaggtgatgttcctgcaatacctgctccaccacctccggcaccgatttgttgacgaaaaaacggtggctgcgaaactgtttatccagtaaggagaggaagggttcgagggttatctgatatttcgactgatcttctgaactgctgatacgccggaaggcagtcaccacgccatggacgcgtttgcagtccgccagctgctgcagtgcgccgccgcccatcgtcagcatggcgggtttgctcaggagctgtgcggcatcaatatttttctctgcgctggtaaacgtaatagtgtaataataaagttcactcagtttttctgccccactgaattcttccacatccagcgatgcggtacatgaaggaatatccagctggtaacggttaagggtggtgccggtaattattgaagaggtatccattatattcctgttttactccgctgtaatgaccatcaaaaatcaattcacaggacgccctgtttaattttgtttaatgataatcatctcattcatcataaatatatttatgtgcatatcgatatatcagataccccaccaggagtttcgtaactaaaaggtaaccccagggatatttatattcactgactgagaaataaaaaaagcagccagaaaccggagccttcaacgtttatcgccgccagcatttctctgccactgtccttagcgctatccatactgatctcctttatccatcccctttcctgcgcttcatccccgcagaggccccgctttgccgacaagtttgactggctgcaggcacgctaccgcccatcgctgtttcctgtttatcagggacccgtagcgcacaaggtcaggcaggcagattgttgttcaacctccgcgatcggggtcgcggattactcggtttcgctttttaatccgttagtctctgctcctgaggtattggccgtgcccggcgtcagacaggcgtccttctgcgggaccagactgatctccacccggcgattttgcgcccgcccctctggcgtctcgttgctggcgacaggacggcttgcgccgtagccctgcaccgcaaaacagctctccggcacatcgccggtatcgcgcatccagtcgcggaccgcctcggcacgcttcagggagagttgttgattggatctatcgttgccgatgctgtcggtatggcctgccaccacgatcagccagccgggtttggccttaatgcccagcagcgagttcaccagcagctttgtcgaacccggtttcagcgtcgatttgccggtatcgaacagcgccatgctatcgaggcggatcgtctgcggcccctgcacaacctgcttaatgaccggacgcggcggcgggggcggcgcccagtcattgatagcggcttcaacgaaggggatcagccggcccccctgatacagccccagccgataacgcagcggctccccccggcgcaaccagtcatccagcaggcggctgtcggcacgcagacgctgctgcgcttgcagcttcggcgtcggcggcgtgccgctgaggcggtgatacaccgccagatgatcgccgacgctgcgcaccaggcgctggttgttgataaaggaagccagcatcgccagcgccagaaagaggaagcccaccccagcggcaagaccggcatcgcgcatccggcggctgaccccgtggcggtgcggcagtgacgacagaagaagatccggcagcgggtgaggacctggcgccgcgtcgttgcccggggagagcgtggtgatcccggcgatttgctgttgccagaggttattcgccaccgccgctaccggtgtcaggcagatgcccgcggcacacaggttcagcggaggaagttctgcctgccgggcgcggaatggccggaaaagagcgttttcggccaaggtcagaatgctctccagccacagcgtctgatgcaggcgtgaggcagagctgccctcccgctgccacccggcaaccgcctggggcgcttgtcccttcagctgcacctggagaccaggcctctccggcgtgatggtaaaccagcggctttccgcggcctggccgcctggcggcgtcacccagaacacgctccacaccggcggcagaccgtttagccaggttcggcactgaacgatactccgccgccagtcgcgcagcgactgcgccagatgctccccggaggggtggtgctccggtaccaccgccagcagcacggaaacctgcgataccagcgccggacgcgccgccgccaggtactgcgccagccgcggcaactgctccgcgctgtcaccccggagataccagccgtgacgggtttcgccgtgcgccgaacgcccgggaaacagaccgtcggtatccccgcagaccagaaccaccgccccctgaaaatcctcgggcggcaggacgatttccgatcgctgacggctgactgcccggcgacgctgacgccagagcgccgcgccgcccgccagcaggatgcacagactgaagatcacctggttgccgatggacagcggccagaagcccagcaccagccacagggccaggatgacggtcagtatcgtaagcagacgacgggcgttatcacgcatctcttatccctgccctgctatctgcgccaccatctgtgacagcacggaggagaaggtcaaccacagcgccgccagcgccacaatgccagccgcccagccgcaccagtacatccgccgtccgctgcgcagccgggaggcacgaaccaccaccggcgcctcctgggtcaggctgaacggcgggacccgcgagccaagcgcttgcgccacgtcctcacgccgttcgtcatcctcggcgcggtactgtccgacaaaccccagttgcaaagtacgatagaaacaagtcagcactgccgcatccgccgtgggctctcgcagcagctggcggatccgttcccagagctcttccccggcgttgagagtgctgaaaaagcgcgcctgcagcggatccttgcgccacctgcggtagccatcatcctgactggcgcggttgaggacgctctcatcgagcagcgcgcagtaggcatagagcatctgctcagcgctggcttcactgactccccccgccgtcagcgcctcgcgcgcttcggtcacccatcgacaggcctggcgatagagcgcctcgccatccgtcaccggctggccgcagcgtaactggctgaccatcagccagcccgggtaaaaagttttgttgatcagatcgctttcagaggtattcatgagcgcagtaccgcaaagagttcaagtttcacgtcgccaagcgattccggggtatagaaggtgcagttgccggcctccagcatcgcgcgggcggcatcggtggagagatccagagcgaaatattggttttccagacgtagcggaatggccgccggcacatggctcagcggtttgatcgcgatgccgctgagggcaatattgacgacctcggcgacatcatcatggctacccgccttacagagctgcggaaagcggctctgtagctggtgaggggggagtgaagagcgcaccgacagataaaaatccgccccctcgcgcagccgcgcatcgtgtagcctgccccgccagatctcccggtcggcgccctgctccagagcgatggcgatcacccttgagggcaggctgacttcgagcagcatatccagcagggcaaacagcggcgggaatacctgctctggcgaggcatgtcggtagcgggggattgcttccagatgatgttcaagggagaaagtcagcagactgccggccagcctggccagttcgcgatagagcagctccggatggcgcgaagggtcctgatgcagctcgctgagcaccggttcagcgctgttcagcgcgttgagcagccagaacagggaaacatccgccacggcaaaatcagccatccgcgcattgctttcacggcgcatggccatcaggcgtctgcgtcgggcctgcaggcgatgtaacagctcgcccagctcgctaaccagcgtcgggcttgccgccagcgacagcagcggcgggatgaattccgggtcaacgatccactgcccctgggcgtcgcgcaccagacgcgctaccgggcaggtgaggaaggctgcattttcctcggtggagagacgcagcgttagcgcgtgtcgcagaacggccagctcgctgcgttcatggccggccagctcctggacggtcacctgctcggcgcgccagcggcgcgggcgggcgctctcctggccgtcatcaagattgccgccgctggcgctgagcagcggcagagcgagcagaacctccacgctgtcctgcatcacgtccgatacatcgcggaccggtggcaaaatatccgccagctcggtgtcaatcagcgttccgtcggcgaaacgcacgatcagccgggtagcgttgagccgggaaagggtgagcgcgctcgcgtcaaactccgcgcgcaataccccccacgggtgggcgagcgccatgcgggagaccgtatcggcgacgtgcgcgtcccagcgggcctgttgctgaaactgctgcgggaccagaaaagccccgtcgcgccataatgggcggaaaatcttcattgcacctcctgtgcctttcactttcattggtctgcagacaggaccaaatgcccggacggatatccctcatccgccgtgtgttcggctggatttattacctgccgcttcagggaaaggaaatatctcccctgcccgcgagagtttcgaagttagatggtattttttggtcaagggatgtttatcataaagcgaaagagtcagggggaggtaacgcctggccctaaataatatctgaattcaacccaaggtagctttattgctctcggtcatcacatgtagaaggaatattccataagcggcccttttattattttcctgttgaatattaattagcgaattaatccctccgtcaggaatatttatatttaccttaaatataaataataataaaaatatcaccgcaatcgatataccctcagtagcgctgagtccagaatctcccccggcaactgccagatacccggaggagtgccccgcccccacccggccattgccaggcgctgcattaccccgtattttggtttcccgctccgctgtgggcgggtatcagggcgaacgagagagagaaaatgaaaccactatttgtctatgggacgctctgtcccggtcgcagcaatgcgcatattctggaggcgatcgggggcgagtggcgtcccggctacgtcaccggcaccttttacgcgcgcggctggggcgcagccgccgatttcccggggatcgtcctcgacgctcacggcccacgggtcaacggctatctgttcctgtccgatcggctggcggcgcactggcccatgctggacgactttgaggaggggtacgatcgggtgccggtggaagtgaccaccgacgatggacagcagatcagcgcctggatttatcagcttcagccccgggggtaatcccccgccgcgctgcgcggcatggtacagcagcccagcgcgatcgcgagtctggcgtcgtttctgccaatgcaggtatacttgccagatgtttcctcagtttcagacacgcagatgacaaaactcaccttacaagagcagatgctcaaagccggcctggtcagcagcaaaaaaatggctaaagtccagagaacggcgaaaaaatcccgcgttcaggcccgtgaggcccgggaagcggtggaagaaaataaaaaagcccagctggagcgtgataaacagcttagcgagcagcaaaagcaggcggtgctggcgaaagagtataaagcccaggtaaagcagctgatcgagatgaaccgcattacggtcgcccggggcgatatcggctttaactttaccgataataatctgatcaaaaaaatcatggtcgacaagcccacccagacccagctgattaacggccgtctggcgattgcccgcctggcggtggataacaagcccgaaggtgaatatgcgattattccggcggtagtggctgagaaaattgcccagcgcgacgccagcagcatcgtgttgcacagcgccctgagtcaggatgagcaggatgaagacgatccgtacgccgactttaaggtgcccgacgatctgatgtggtaaccccgggctttcccgccgcgggcgatcaaaacgggctcgcctgctggatatgcatcggctcatggctgacggggtggacaaagcgcagttcgctggcgtgcagcatcagccgcggagcctgttccgtgccgggcagctcccggccaccgtacagatcgcagccaaggatcggatagcccagcagctggcagtgaatacgcagctgatgggtccgtccggtctccggggtgagcgtcacccgggttaacgccagcgccctctcgccttctcgcgcctgatacaggcggtctatgacccgatagcgcgaacgcgccggtttgccgtggcgggcgcagagcgccatgcgcgggaaacgggccggatctttggcgattgccgcctccactatcccctcatcttccgccagatggccgcacaacagcgccgtatagaccttgtccaccgtgcgctggctgaactgttggcacagcaaggcgttaatgcccttgttgcgggcgatcaccatcaggccggaggtgccgaagtccaggcggtgcaccagggtgcagcccggatagcgctgtaccagccggtgatgcacggagtcgaggttgcgcggatctttgcccgacaggctcagcagcccggcgggcttattgatcagcaccaggtgttcgtcctgatacaagagggtgatctgttcgcgacacggcggcgcgacaaaggtatcgataatggtggacatcaggcggcccgaagaaggagtggctggcgatagtacctcattttgcccaccggcacgatgctggcgcacaatccgccctcgcggcggcgtcatttatcacccacacttatcgcaaaggcatggcctgtacaggcaatgtgctttacactgcgcgctgcaaaatttgtgttaaccaacgagtaatacggtaatggcgatgaacggaacaatcacaacgtggtttaaagataaaggttttggatttatcaaagatgaaaacggcgaaaatcgttattttcacgtgattaaggtcgccaatcctgatcttatcaagaaagacgcggcggtgactttcgaacctaccaccaacaataaagggctgtcggcctacgcggtgaaggtcattccggaaagcaaatatatctatattgccggcgagcggttgaagctgacctccatcaaatcctatgtggtgtaccgggaagaagagccggtcgagacccgcgtcgataaagaaaacgccgtgctgtcggtcgggctgctgatgaacagcatccggccaaaagccacggtgcagccgggagagatgcgctcggtgaaaaagctggcgatcaccacctttcaggggacaaccctgatcttttcggaagacgaaatcgatatcgatgccacggtaaaactgcttaaggtgtaagccctggcgcgcggtttcccgcgcgcccgaagtcctgcccgatatgctacccgccatcgcccctcgccggacggggcgatggcgccagagagccgataaggatgccgccatgcccgtaaattttgacttcaacgatctctacgcctttcgcgccctgatggaatatggcagttttcggctggcggccgaatccatctgcctgtcgcagtcggcccttagccgacgcatcgaaaagctggagacggcgctgggcaaccggctgttcgatcgcaccacccggcgcgtgaccctcacgctgtatgggcaaaattttgccgaacgttcggagcagctgctggcccatgtcgagacggtgctggcagatatcagccaggtcagcaaggcgcgcaccgggctggtgacggtggcgacagtgccctccgccgcctactactttatgccggaaatcatccgcagctttcaggcgcgttatccccaggtgcgcatccggttgattgacagcagcgtcgggaatgtgatcgaggcggtcagcagcggacaggctgactttggcctctgctttgccaaaaacctgccagccagtatcgaattcacccctcttgccgacgaccgctatgtggccgcctgtcggcacgatcatccgctggcgcgcaagacgcacctaagctggcaggcgtattttgaacaggattatattggcctggatcgggtctccggcaaccggacgctgcttgaccgggagctggcgcatctgacgccggcgcggccaagtatctgcgaaacccgccacgtcaccacgatgctggggatggtggaagcgggcatcggcattgccgccgtgcccgcgatgtcgatgcccgccggggagcattccgttctccgcgctgtgccgctcaccgacccggtggtcacgcgtacggtaggcctgatccgcctcagcggccgtattcagtcctacgtggcggcagagctggagaagctgattattgaacagtatccttctggctgaccggcgcggcggcggctacgcttcgcataccggtggcgtggatggtctcctgcgccgccggtgacgccagatacgtcagcagcgccttgccttcctgcgggtggtcggcgctgatggtcaccgccccggcaaagcgggtgatgtactgcaggttatccggcagttcgccgacgaaggttacgccgggcaccggcagcagttcgctcacctgctgaaaaccgatcgcataccgtcccttggccacttccgaggccaccggaatgcgctccaccatctgcgctttactctgcatcgcgtcatcaatgcccagggtgtggaacagcgtcgagctgacatagcgtccgctggcgctgtcggagtacgcgaccgatggcgccgccagcagcgtcgcccgcagctggtctgcgttgtggatagccggcagcggcgcccccgccttcaccaccacgccgatcggcgagtcggccagctcccggcgcgaatccggttgcgtacggcccgctttctcgaggctggtcagcgcgtccccgaccatgatcaccacgtccgcgtgttcgccgcgcgccagacggttagggatcgcctgcggcgtttttcccatcgacgggccagggatcaccacgaggtggttgccggtttgtttttcccacgccggggccagcttttccagcgccgctttgaagccgccggagatcatcacggtgacctcagcggacaacgcgctgccgccggtggcggccagcagcagcgtggctagcagggttcctgtcgttttacgcatcatcttctccctgattaacgtgccgtctgcagcgcaacggcgctacggcgatagaggtagcaagtggccagcagaccgcagatggcggcaaagctcatccagtagccgggagacgctttatcaccggtatactcaatcagcgccgtggaaatcaccggcgtgaagccgccaaacaccgcggtcgccaggctgtaggccagcgagaaacctgccacgcgcacttcggcgggcataatttcggtcagcgccgggatcatcgccccgttgtacatgccgtagataaacgacagccacagcagcacgctcagcatcatcaaaaagctcggggcgttcgccagcatggtcagcgcaggccaggcggtagccagcgccagcagggtcatggcgatcagcaccgaccggcggccaaagcggtcggacagcgccccgcccaccggcagccagaagaagttggaaatcgccaccagcagcgtgaccagcaggctgtcagaggcgctgagcatcagcacctttttaccaaaggtcggggcatagacggtgatcaggtagaacgcggtggtggtcatcgccaccatcatcatcccggcgataaccacctgccagttcgccagcagggtggcgaatacctggcgcatcgccagatgatggcggcgggcagtaaactcctgggtctcctccagcttacggcgcaggataaaaatgaacggaacaatcaggcagccgaaaaggaacggaatacgccagccccagtcgctgatagcgctcggctccagtaccgcgttgagggcaaagcccatcgcggctgccaccatgatggcaacctgctgactgcccgactgccagctggtgtaaaagcctttgcggcccgaggtggcgatctcggccagatagaccgacaccccgcccagctcggcgcctgcggaaaagccctgcagcagacggccgatcagcaccagcagcggcgcccacaggccaatggtctgataagaggggatcagcacgatcaggaatgtgccggtggccatgatcgacagggtgacgatcagccccttgcgccgccccaccttgtcgatataggcgccaagtacgatagcgccgatggggcgcatcaaaaagccggcgccaaagactgcgaaggtcatcatcagcgaggcgaattcactgctcgccggaaaaaaggtatgggcgatgtaggtggcataaaacccgaacagaaaaaagtcgaactgttcgagaaagttaccggacgtgacgcgcagaatggcgccgatccggtcacgggtactcatctgtgaggttgttgaatgcatgcaggtctccagtttgttatccacgcgttgtcgcgcgcctgtcgctgaagactgaaacagaaccgggaacgaaataagcgtaataaacgcatccactaatgcattttacgcatgaataacatttaactaattaacattacttttacatacaatcatttaacacacaccgacctaaccacgccgcgggtgacggcgaaaaagtcagttttccgttttgtgaccggggccaggatatgtcgccgtgggttgaaggcataaaacctggcctggggtaacgaaataccctgccggctggaaagcgcgtcaggaagcggtggactcccccaccagcgtctgcaacagggagataagccagcgggtagcctcgcgtttcccgctgcgttggtgggcgtaaatcttgacgtcaaacggcggaaccggaaacggcagcgggaaaatggtcagccgggcggcgcgggccatcgtctccgccgcccgccggggcagcgccatcaacaggtcgctctgctcaataataaagggcgcgctcagcatcgagggggttttcatcgccacctgccgcgaatagccctgtcgctccagctcacagtccagcaccccctgccgctcattccacggggtcaccaccagatgacgggccgcaaggtaggcgtccagggtcagcgccgtccggttggcctggctgatgaccacatattcgtcccgcagccagttaatctcctcaagatcgggatgggctggctcgtcaggggtattgaacccgagggccaggtcgacctcgcccgccagcagctcggtcagcgccgggctgtggggcagataacggagctcaaaccgcagcccgggcgcctcacgctgcaggtgatgcatcagcgtcggaaagacgcagaacgcggtgaaatcggtgatcgcaatctgcatgcagtcggtgctggcggccggcacaaacgccgccggcggcgtcagctcctggttgagaaacttcagcgccgaagcgatagagggcgccagctggctggcatagacgctggggcacatccggtggccttcgcggtagaacagcggatcgttgagggcgctgcgcagccgggaaagcgcatggctcagcgccgaggtgctcatcgccagctcttccgccgccaggcgtaccgagcgggagcgatagaccgcgtcaaagaccggcaacaggttgaggtcaatccggcgcaggacaggatgcataatattcatcgtttgctgatttcattgcacttaattcttttcacaataccgcttatcctcagggtcagcaattttgctctcttttgactatggatacaggacaccccatgagcatcacaatccgccaggccaccccggacgacgccaccgctatctacgacatgatttatgaactcgcggtctacgagaaagcccccgaagaggtagtgacgacgccagaggagatcagagagacgctgtttgccagcggcagcaaaaccgaagcgctgatctgcgaggtggcgggcaaagcggtgggctacgcggtgttcttcaccagctactccacctggcttggacgcaatggtatctatatggaggatctgtacgtcacccccgactatcgcgggatcggcgccggaaaagcgctgctgaaaaccatcgcgcaatatgctgtacaacgtcagtgcgggcgtctggagtggagcgtgctcgactggaaccagccggcgattgatttctatctgagcattggcgcgcagccgcaggatgagtgggtgcgttatcgcctcacgggagatgcgctgcgggcctttgcggagtaaagcggctcaccagcaggtcggcgccaggcgtcgacctgctggccgcggatcaggcttcgaccgcgctcttctgcagctgcggaccggccagcgccagacgcgcgcccgcttcggtatcgctgtactgcttgaagttatccataaacagctgagccaggctctcggccttctcctgccatttatccgctgaactccagccattacgcggatccagcaccgcgctgtctacccctggaatgctctgcgggatcgcaagaccgaacaccgggatggtctcctcgcgcagcgggccggtagtgccgttgaggatcgcgctaatgatgctgcgggtatcgcgcagcgacaggcgtttgccctcgccgttccagccggtgttgaccagccaggcttcggcaccggattccgccatcttcgccgccaggacgctggcgtactgggtcgggtgaagcagcaggaacgccgcgccatagcaggcggagaaggtcggcgtcggctgggtaatgccgcgctcggtgcccgccagcttcgaggtgaaacccgacaggaaatggtactgcatctgctcggtggtcagacgggagaccggcggcagaacgccaaacgcatcggcggcaaggaaaatcaccttcgacggatggcccgcgcgggacaccggcttgacgatattgtcgatatgcgacagcggataggagacgcgggtgttttcggttttgctgccgtcggcataatccacgctgccgtcagcgcgcactaccacgttttccagcagcgcattgcggcggatggcgccataaatctccggctccgcctgcggatcgagattgatggtcttagcgtagcagccgccttcgaagttaaacacgccgtcatcgtcccaaccgtgctcatcatcgccgatcagctgacgatgcggatcggtcgacagggtggttttcccggtcccggagaggccgaagaacagcgccacgtcccctgcttcgccacggttggccgagcagtgcatcgacgcgatgcctttctgcggcagcaggtagttcatgaccgagaacagccccttcttcatttcgccgccgtaccaggtaccgccgatgagctgaatacgctcgctgagattaaaggcgacaaagttctcggagttcatcccctgcgcctgccagttggcattggtgcagcccgcgccgttgagcaccacgaagtctggcgtaaagctggccagctcgtcggcgcttggcacgatgaacatgtttttgacaaagtgggcctgccacgccacctcggtgacgaagcgtacgccaagacgggtgtccgggctggcgccgcaccaggcgtcgatgacgtacagttttttgccgctcagctggcccgcgaccaggcttttcaggctgcgccacacgtctggcgataacggtttgttgtcgttgcggccgaggccggagtctgcccaccagacggtgtcgcgagtctgttcgtcgcggacgatgtatttatcgcgcggcgaacggccggtgaagatcccggtatcaacagccacagcgccagagtcggtcatcacgccgcgggccgcgccggtcagctcaggagaggtttcatgtgcaataagcaaatcgtaatcagggttgtaatagaattcgccgcttgcattaatccccagctcctgcagagccatttttactgattcaatttgttgtgacatggaactcctgacaaactatttaaggtaagaggcctgggttattcattgctttcgtcatcgtcgccggctatttaataagataagtcctggacaatgaaataaagcaataaataaccgtgagtcgcgatttcatatcgtgctcatgtagggtcgccgatatgcattcataaatctcaactttccaaaaaatgttaacacctgtcgataattatgttaattgcatagtttctatgcgctatgctaaaattgcatagcctttattgcgtttttgaggactggatcggtgttggcaaatctggaagtaaaatggctgtatgatgtgattgccctcgaggagtcgcgcagctttaccctggcggccaaagcccgcaacatctctcagtcctcgttcagtcgacgcatccagtcgctggaggcttccctcggattcagcatcttcgatcgtagcgccaaccctctgcagctgaccaaccgcgggaaaatttttgtcggctatgcgcgaaatatgctcgatgacatggattttcagatcagccgtattaagggtttaaataacactacccagaaaataagaatcgacgccgccccttcgctgtcggtgttattactgccggagatcatcgccggttacaccgaccgtaaaaataagacttttcatgttgaatcgattaacgtcaacgacgccgtatttaacctgaaagagggaaaaagcgattttatcctctccttctataatgaagaattaatgaactatccgtttattaatcataaaatttttgattcttacctgcacctggtctctccctgcgacgaacatggccgcccgctgtttcatttacatcgcggcgtgctgccgctgatgaaatacgccaacgacagctatatggggcgccaggtgaaccaggtgatcgatcgcacgccggagatcaccttctcccttacgtttgtctcttccatgagcgagctgctcaagcgcatgatcctcaatggcgacggcgtgggctggctgccgcagtactccattcagcgcgagctggacgaaggccggctgacgatcctcgatgagagcctgtcgctgccgatcggcgcctggctctaccgctccggctcgcggcttaaccaggccgccgaacgtttctggcagcacattaaaacccgtaacgaaccgcgggaataaccccctcagccgctgatccccagatatgccttacgcacctccgggtcgttgagcagcgtctggccgctaccgctcaggcggatctggccgttcaccatcacgtaggcgcggtccgacagattgagggcatggcgggcattctgctccaccagaaacaacgtcatcccctgagccgtcagctcgcgcaggatctgaaaaatctgcttcaccaccagcggcgccagccccaggctcggctcatccagcagcagcaggcgcggtcggctcatcagcgcccgggcgatggccagcatctgctgctcgccgccggagagggtcatcgcccgctgtccccgccgctcttccagccgggggaacagctggtacattcgcgccttgtcctcggcctgatagcggttgccaatggcaatggtccccatcagcagattctcctcgacggtcatatcgggaaagatgcgccgcccttccggggcctgggcgatgccgttgctggcgataaagtgggtcgacttccggctgatcgcctccccgcgatagaaaatctccccgccggcaatgcgcggctggccgaagaccgacatcagcagcgttgatttaccggcgccgttggcgccgatcagcgccaccgtctccccctcgttgacggtgagggagacctgcttcagggcctggatcggcccgtagaagacatccacctcattaaaggcaagcaaaggctggctcatcggcgcgtctcctcttcctcagcgcctagataggcggcaatcacgctggcgttggcctggatcgcctgcggcgcgccgcgggcgatgacgtccccgtgatcgaggacgatgatatgatccgaaatctccatcaccatccccatatcatgctcgatcagtagcaccgtgatgccgtgctgctggcgcagaaagcgaataatccggctcagcgcctgggtttccaccgggttgagaccggcggccggctcgtccagacagatcatctccggacgagtgcacatggcgcgggcgatctccagccgccgctgctgtccgtaggagagggtccccgccagacggttggcgcagtccaccatctccaccacctccagccagtaaaaagcgcgatccagcgcctgactctccgcctgccgatacccacgggtattgaggatcccggccagcagatggcggttgacctgggtatgctgggccaccagcaggttctcgatcaccgacatctcgcggaataaacgtatattctggaaggtgcgcgccaggccagcgcggttcaccagatgggtgccaccgaacatcttgtaatagatccgcctccccagctgcgccgggtggagaaaatcgtccgggtgaagcttctgccccagcacctgaataacatcggtgaccttttcccgcgcccgcagcacgatactgccccccgtcgcccgataaaaaccggtcaggcagttaaacaccgtggtcttgcccgcgccgttggggccgatcagggcggtgatcgacccccgctccacctccagattgacatcattcagcgctttgatgccgccgaaatgcatcatcagatgctcaacgcgtaagatgctgtcggtcatggcgcgactccttttcgcaacgcaaccccgctgcggctggtgcgcaccaggccgcgcggccgccagatcatcatcatcaccatcagcacgccgaacagcagcacccgatattcgtcaaaaccgcgcagcagttccggggtgaccgtcagaacaaacgccgccagtaccactcccagggtggagcccattcccccgagcaccacaatcgccaggatcagcgccgactcaaaaaaggtgaacgacgtcgggttaacaaacccctgatagctggcgaagaacaccccggcgatcccggccgtcgacgcgccgagcataaacgccgagagcttcaccagcacgtgattgagccccatcgcccgacaggcgatctcatcctctcgcagcgcctcccaggcgcggccgatgggcatccgcgtcaggcgatgcttcaccagcagcaccagcatcaccaccaggcacagcacggcgtagagaaagatgaatttcaggttggggttgtagctgacgtggaaaaactcatggatggggatgccgccatccttggcccggcgggtaaactcgaggccaaacagcgtgggggatggcaccggtacgccgttagggccaccggtgaagctcacccagttgttaagcaccaggcggataatttcgccaaagccgagggtgacgatggccagatagtcgccatgcatacgcagcaccggaaaacccagcaacgccccggcgagggccgccatcaccgcccccagcggcagcatcgcccagaagccgaggcccaggtactggtagcccagcgccaggccgtaggcgccgatggcgtaaaacgccacatagcccagatcgagcagacccgcgaggcccaccacaatattcaaccccaggccaagcagaacgtagatcagcccaagaatggccacggtcagcagatattttgtggcgagaaacggaaagacaatggccagccccaccagcagcggtattatccagcgcagccgcgagcggtagcccggcggccggacgtataccccgtcatccgccccctcaaagcgggcaataaaggcttttcccctgtggctctgcagcagcagactgagcgccagcctgccggccatcaccaccgccaccagaatcgccacccgcgcaggcgcgagggtaaaaccataccctttgagcaccacgccgacgatcggaccaaagacaattaacgcgcaaaggccggccagtacgctgtcgatcagcgcgttttggatagcccgcgcaggctggcgcgtaatttcacccataaagcctccttagaccttggccaccagcggacgtcccagcagcccctgcgggcgaaaaatcaggatcgccaccagcagcgcaaaggaaaagacatctttgtaatccgaattcaccagcccggcgaactgggcttcggccaccccaagcagcagaccacccagcatcgcgccaggcagcgagccgatcccgcccagcaccgcggcggtgaaggctttgatgccgataataaatccgatatagaagtcgaaggtgccgtagttcatggtcaccagcacgccggccagaccggccatcgccgcgccgatgacaaacaccagggagatcacccggtcggtattgatgccaaggatcgccgccatgcgccggtcctgctgggtggcgcggcagatgcgccccagccgggtatactgaataatccaggtcaggataagcatccccaccagcgccgcgacgagaataaacaccttggtccaggtgatctgcaccaccccatcgcccaccgtcatgcgcaacgcgccgctaagcagcgtcgggatcccctgctggttcggcccctggctcagctggacatagttctgcaggatcagcgacatcccgatagccgagatcagcggcgccagccgcgtcgagttgcgcagcggccgataggcgatgcgctcgatcgcccagccgtatacgccggtgaccacgatggtgaacaccagggtggcgaaaatcagcagcggaaaggagtggatcccgaagaaagagagcagcgccaggccgatggcgcacaggtaggcggagaccatatacacctcgccgtgggcgaagttgatcatgccgatgatcccatacaccatggtgtagccgatggcgattaagccgtacaccgcgcccagcgtcagcccattgatcagttgttgcagaaaaaacgccgtcatagcccctccagccgccaggcagacggccgccgggttccgttcccggtcaaccgccgtcatgtgacaattcgcaagtcaaaaggacagagcgtcctcaggtcgtggccgatcagagctggtgatatttgcccttgtcgtcccactgatagaccacgtagtcggacaccttgaggtcgcctttgccatcccaggctttcttgcccatcaccgtctcgacgtcgtggctcttcagccagtcgctggctttggcgttatcggtaccgacggcgttccaggccgcggcgatagcctgaatggaggcgtaggcgtagagggtataaccttccggctcaaagccgctggcgcggaacttctcgatcaccgctttgccgtccgggagggtgcgcggatcctgaccaaaggtcatcagcacgccgttggtgaactgcggcccgccggcggccgtgaccagctcctcggtgacgatacagtcgccggagaagaatttggcctgcaccccctgctcgcgcatctggcgcaccagcgggcccgcttccggatggcagccgccaaagtagaccacgtccggcttgagggcgccgatcttggtcaccagggcgttaaagtctttttcaccgcgggaaaggccttcgtacaacacttctttcgtaccccgcttcgccagcgccgcgcgggtggcatcggccagcccctgaccataggtgtctttatcgtggatgacggcgattttcttcgccttcagcacgtccagcatatagttggcggcgatcgccccctgctgatcgtcacgaccacacatgcggaagagatctttcatgccgcgctcggtgatctgcgggttggtcgagccgggggtaatggtcaggatcccggcttcgtcatatacctcggaggccggcatcgttgaggaagagcaaaagtgccccaccacggcggagactttcgcttcatccaccagccggttggccaccgccaccgcctgcttcggttcgcacgcgtcatccccctgcaccagcacaatcttttcgcctttgataccgccggcggcattgatatcggccaccgcctgcgaggcccctttccagtactgggcgccgtaggtggcgttgggtccggtaaagggcccggcgacgccgatcttcacgtctgcctgggcgtaaaaggccatgctcatacaacctgctatcacaacatgaagcgtcattgttttcagtttcaaagacattcggatattcctcagcgatgtaaagcctggcgtcatggaatgacgcagaaaatatcacttaccgtgtggtgccgacgttggcgcagcgccaggacggccagggtggaagaagcaaaaatcccgccaggaaggagtggaacaccggagaacagtcgccccggtcggtacgcacgcgacggcaacccgtgccgcatccggcaagggcgcattccctttcaggtcaggagatcggttgccatcacgtggcgagccggacaacgcggtatccgtaccggcccgtgagctaaacatagatgcagttagcggtcgctgcgcgccggcgtggtgcaaaaatgcgaatatgatcaacagtggtgattattttgttgcggtaatgtgaagatgataacaggagagcccgttaaaggctctcctgtgacccggtggccgctcagagtcggctggtgaacgttcgggagatcacatcctgctgctgttcgcgggtcagcgcgttaaagcggaccgcatagccggagacgcggatcgtcagattcggatactgctccgggtgttctatcgcatcgagcagcttttcccggttcagcacattgacgttgagatgctgtcccccctccaccgtctcctcgtggtggaagtagccgtccagcaggcccaccaggttgttttcctgagctgacggggctttgccgagcgccgccggcacgatggagaaggtgtacgagatgccatctttggcgtaggtaaacggcagtttcgccaccgaggtcagcgacgccaccgcccctttccggtcgcggccatgcatcggattggcccccggagcgaacggcgtccccgcccgacgtccgtccggggtgttgccggttttctggccgtataccacgttggaggtgatggtcaggatcgactgggtcggcaccgcctgacgccaggtggggagcgcctgaattttgcgcataaagcgctccaccaggtcgcaggcgatggcatcaacccgatcgtcgttgttgccgtactgcggatagtcgccttcaatgacaaagtccaccgccagcccgtggtgatcgcgcaccggcttcacccgggcgtactttatcgccgacaacgaatccgctgccaccgacaggccggcgatgccgcaggccatcgtgcggtagacgtcgcggtcgtgcagggccatcagcgccgcctcgtagctgtacttatcatgcatgcaatggatgatgttcagcgcgctgatgtactgcaccgccagccagtccataaagtggtcgaggctggccatcacggtgtcgtagtccagcacctcatcacgcagagggtcggttttcggccccacctggatcttcagtttctcatccaccccgccgttaatcgcgtagagcagcgttttggcgagattggcgcgggcgccgaagaactgcatctgcttgccgatcaccatcgggctgacgcagcaggcgatggcgtagtcgtcgctgtgaaaatcgctgcgcatcagatcgtcgttctcatactgcagcgacgaggtggcgatagagacccgggcggcatattttttaaacgccgccggcagcgcttgcgaccagagcacggtcaggttcggctccggcgccgggcccatggtgtgcagagtatgcagatagcggaaggtggttttgctgaccagggtgcgaccatccagccccatgccgcccagcacctccgtcgcccagatgggatccccggagaacagcgaatcaaattccggggtgcgcaggaaacgcaccatgcggatcttcatgatgaagtgatcaatgagctcctgggcctgctcctcattcaataaaccggcgcgcagatcgcgttcgatatagatgtcgaggaaggtggccgtgcgccccagagacatggcgccgccgttctgcgacttcaccgccgccaggtaggcgaagtagagccactgcaccgcctcccgggcagtgcgcgccgggtgagagatatcgcagccgtagcgggccgccatctcctgcatcagcagcagcgcgcgccgctgttcggccagctcctcgcgcaggcgcagggtggcctccagcgcctcgccgcgctcaagggccggctgcaggtcggcaaactgcagctcacgttcgcggaccaggtagcgaatgccgtacagcgccacgcggcggtaatcgccgatgatccgtccgcggccatagccgtccggtagcccggtcagcaccccggatttgcggcagcgcagcatatccggggaatagacgtcaaaaacgccctgattgtgggtcttacgcagcgccgtaaactgatactcaaagtcaggatccatttcgcgaccataggcctcgaaggcgcttttgatcatcttgatgccgccaaaaggatgcagggcgcgcttcagcggctggtccgtttgcaggccgacgatcttttccagcggctggttgatatagcccgccgcgtgggcggtgatggaggtggcgacattggtgtcgaaatccaccggcgcatgggtggcgttctcgacgcggatcccggccatcacctgctcccagagggcggtggtcgctggcgtcgcgtcggcgaggaaagactcatcgccctcgtaaggggtgtagttatgctgaataaagtcgcgaacgtcgatctgcgtttgccacgccgtaccgcgaaagccctgccaggcgtcggcgtatcgtacatcctgggtatcgatatctactttcatgaacatcgtctctctacagaataaaaagtcaggccagcgccgccgcggtgtggatccggcctaagcggatcgcatcgagggcaatcatgcgctcttcattggtaggaataaccgcgcagcgcacccggctgccgtcggcggagatcaggcgctcgccggccgaattgggctgctgattgcgggcggcgtccatcgcaaggccaaagaccgccagccgctcgctcaccagccgacggatcagcaccgagttctcgccaatcccgccggtgaaaataatgccgtcgagacgctgcagcgccgcggcgtggccggcaatatggcgggcgatacgatggacaaaggttttaatcgccaggcgggcgcgggcatggccctcatgccacgcctgctccagcacccgcaggtcggaggaaagaccggagatccccagcaggccggaggcggtgttggctacccgctccaggtcgctgagggtctgccgggtttccccggcaatccacgccatggcgccgaagtcgacatcaccgctgcgggtgcccatcatcagcccctccagcggcgtcatccccatcgaggtgtccacgctgcggccgttacgcaccgcgcagatcgaggcgccattgcccaggtgggcgatcaccaggccgctctcctgctccggcaacccgagcagcgccagggcgcgctgggacacatagcggtgcgaggtgccgtggaaaccgtagcggcgtaccccgagattctggtaatactcccacggcagaccatagagaaaagcttccggggccagggtctggtgaaagctggtatcaaagaccgccacctgcatcacctccgggaacagccgctgcgccgaggcgatgccgctgagactggcgtagttatgcagcggggccagggacgatacctggcgaatgttattgataacctcctcgctaataatgaccgactcggtgaacaggtcgccgccgtgggcgacgcggtggccaatcagggccacgctgtcgatgaggtcgcgttgggctaatgccccggcaatcgcctgcagggcgccttcgtagccgcgctgcgccagcgccaccggctcgccgccgttgagcgagagagacgcccgttccgcgttgatgccctcggccacgccgttgagcaggcagtcgcagctggcggcgcccaggacggaaaatttgatcgacgacgagccgcagttaatcaccagtactaccggaaattcagtcatgttgtactccgcgtggcctgagccggattagaacagtttgtaaacgatgttgaggatggtcagcagaccgatagcggtcacaaagaggttatcgagacggccacggtatttggccagcgaaggcgctttacgaatggcgtacatcggcagcaggcacagcagcgaggcgataatcggcgcgcccatggcctcaatcaggtcgaggatattggggttggcatacgccaccacccaggtcgagcccatgatgaacaccatgctcagggtattgagcttgccgctggagacccgggttttatcccctttatagccaaagcgcaggatcagaccgttcagcccttcgagcgtgccgagatagtggccgaaaaacgatttgaagatggccaccagggcgatgatcgacgcgccatactccagcagggtggcaaaggtggatttggtgcccgacatcgaggcaaagtggttcgccagataggagagcaccgggatattctgcgccttggcgtccgccatgttctgcggtgagagggtaaacaggcagctgaaggcgaagaacatcaccaccgccaccatcagcatgctggcccgggagatgatctgtgagcatttgcgttcggtatactcgcggccaaactgcgcttcatactcttcgcgtttggagaccacaaacgaggagacgatcggcgagaagttgaaggagaacaccatgatggagatgcccagccataccgtcaccagaatgccgtcgtgaccggttaaggcgatatcgctgaggttgacctggtcaatcaccgcgctattccagtaggggatcagggacagggagatcaccaccaagctggcgataaacggccacaccagatagctcatcaccttgaccatcaggtctttaccaaaccagatgacaaacgccatcagcagcagcaggagcagcgccaccaccccgcggttgagagccggcatctgcagctggttctcccagaaagtcataaaggtattggtgatcgtgacgccataaatccacagcagtgggcagatggcgaagaagtacagaaaggtgatcaccaccccgccggttttgccaaaatgctcttccaccgtttcggtgatattgccggaggggttagcccccgacaggcatagccgggccagggcccgatggcaataaaaggcgatgggataggccagcaccagcatcaccaggatcgggatcagcccgccgaagccggcgcggatcgggaaaaacagcaccccggcgccgatagcggtgccaaacaggcccagggtccaggtggtgtcagatttacgccaggacgaaaggcttgtctggctggatgcaatgctctcagtcgtactcatatcctgtcctcacttatgtattgaattaagcgtcaacaaaaccggtaatttgcgatacccgggagagatcgatattgcccccggaaatcagactgaccgttttgcggttctggatatagctgtcgagtttgccgcttaataacgcggcgcaggccaacgccccggccccttcggtgatcactttattgcgctgaattaaggcgaccatgctctggcgaatgtcatcctcactcaccaggacgatgtcatccaccagctggcgggcgatttcataggtcagtttccccgggcgggcgacgtcgcaaccatcggctaaggtgccggcgtggcgatggctggtgatttccccggcataccaggaggcggccatgccgtgaacattctccgactgcacgccgataatgcggattgtcgggttaatggatttaatcgcgatcgcgataccggcaattaagccgccgccgccaatgggcacgatgacattatccacgtcatacagatcttctaatatttcgagtccaatcgtcccctgcccggcgataacctgcgggtcgtcataggggggaataaaaatgcggccctcaagttcaacaatatcgctggctttggcgagggtatcgttaaagttatcgccatgtagcaccacttccgccgaataatcacaggtggcggcaactttcgatttcggcgcccctttcggcatcaccactttcccgtcaatgccgagcatggcgcaggagagcgagacgccctgggcgtggttgcccgctgagcaggccaccacccctttgcgtttttccgccgcggttaaaccgcacagtttattaaaggcgccgcgaattttaaatgaacccgtgcgctgcatattttcgaatttaagaaatatttcgccctggcagcgctcgctaaaataattcgaacggggcatgcctgttttatatatttttcccgcgaggcgttgtttcgcttcgagaatatcgtcaatagataccggaagatcgtaggtaatatgcattatggcctctgtatcttaatataaagtcaatgaccgggcgtcatcctgctgataacagcgaggacgtgtgttggattatttaacgactttcagttacgcaataatttgtaatggctgccagtggcggttgccctgccccgaggaatagtgtttcgccatctccaccagcgacgccgcggcggtttttaaccggtaatttttcgaccataccgccgcatagcgcgccaccggcaaggcctctttaatggggatggtgacaaactggctcgagccaaacggcgtggtcatgtcgcaggggatcaccgtcagaaaatcggcattgagcaccaggttatagatcgtcaccaccgaatcggtattaacgatattttcacggcggataccgctgcgctgcagggtggtcagcagttcgctgtagtagcccatattggtctccggcagcacccactgctcgtgctggagcgaggccaggcggacggtgccgttgccgatccgcgcccggttcgccaccagcacaaactcagactcaaacagcggctcgacgtgcaggtcctgcagtttcatctcatcgctcagcgtcccgatggcgaagtcgaggcgcccgtcgcggattgccggcaaaaaggcggagagctgcgcctcatacatcgagacccgcgccttggggaaagtcattttaaactgatgcaccatctccgacataaaggtaaacccgaccagcgaagggaaaccaaaggagacatccaccaccgcgctgttggtcagagcattcatttcattgaccatatttttcatttcacgggtgatcgcttctgaccagttgagaaatacctgcccggcctcggtgagcgagacgccggtatttcgccggacgattaattcgctgccaaaataactctccatgtcgccaataattttactgaccgccggctgagtgagtcctaacgcttttgctccggccccgattgacccgctgcggatcacttcctggaaaactaccagatgctgtgttttaggcagagaaaaagtattcatcgcgtctcactttcattcctttgttgacggcggaaagtgtaacaaatcgcaattgccgggttatgtgagagctctcacaaaggctccgccgcggcggataagcaggatccacgagccagaataagtaaagtaaaatcaatatattaaaagcatcatgaacgctatttgcgcgccttttgccgtggccgaatgcggggataaaaataattgatggcgataacatcgacggcgaaatggcgataaaaaatacgccttttgtacgttattcgacccgcgctatcagggtgagaagaaagccgaaaattaaattaatgctgtaaagaataaaaagcagacgtaataaacgccattatttaacgacaagccggtcgggcatcacattttatccccggcggttggggaaaatgcacggtcattatttacaccaaagaaacattaaattcacaatttttcttttgggtcgcgataggcagcgatcttttttccgccatagcgcagttggtcatactttgattaaaatcaaccctggtaatttatcttttacgacggccattggatagtcatttgtgttgccgatcacaaatccataaaacaacgacccggcctatcgtgaagagatgatcccgcggctgcgccagcagcttaacgagcagctgatgagcgaccagctggctgtcgacctgctctcttcctatctgcgaatggatctcagcgcccagccgtgggaccagccgctatagcccgccccggcgcagatcgctggcccaggcatttcgcctatagctggctgacccccagcgccgcggcctcatcccgccacgccagcagcggcgcataggcctcccgcgacatatcgctatagccgcagatcagcaaggcgtcgcacagggaacgatagcgcgcatcgctcactaactgctggagcgcctcgcgcaggctattcagcgtcgccgccggggtggcgccggcggtgatcagcggcagccctggcgcggccgggctccagccgatcgccaccaggccagccagagcctgcggctgatggcgctgcagcagcgcgtaggtcacgcagtcgatggcggcgatatcggcgttttcctgctgcagttcgcgcagcgactgccgatggctgccgctgaacatcaccgctgaaaaaaaacgcccctcccgggagagcggcgcgaccattttacgcagtacgttgtagccggactgcgagtgctcggcattgcacaccgcccgacggccaaaaaagtcccccagcatccggtgactatccgcttcgcggaccaccagcaggctgcgatagcggcgcccttcgcaaccgggcgcagcgtagtggaagcagcccaccgtctgcacctccggcaattgggtcaccagcgggtagccacaggtctggctcagcaacagcgtcggctggcgccagtgagccagcagatccccggggtcagccgccggagggtcccccgccaccatcacgccgcgttcgtccagcagcgactgcaccgtctgccacagggcctgggtctgttgacggtggatggcatacatcggaaaggtcatgcgttcagccatgttctcctcccgcctgcgcctgctcgccaaagcccggatgggcattcaccgccaccgcccggcggctaaaatggcgtcgccactcgccgtacccgcgcaccaggaacccctgattacgctgcagatacgccgcctggcgatgcagatacagttgacgtaaagcgtaccaggggacccctggcagatcatgatgcaccgcatggtagttgagattgagaaacagcacccgccaggggagcccggcctcgttgatcaccgagcgggccagcgggtcatccgcggcgcggtgttcgagaaaagagcgtactttggtcagggccagcgccgggtagctcaccgccagcacaaaccacagcggagaaaaaccctgcgccgccatccaggtcagcaggcccgtcagcagcaacagatgcagactccacatggcgatagcgcggcggtcgccctcgcggaaagcccgcagcgcgctgttcagggtgtgaataatatccatcatcggcgccagcagcagacgcccccagaaggtgttgcgcaggtggataaggcggcgctgccaggctgagaagcgctgccagctttccgccgttacgtagtacgattcggggtcatcctcagggtgcgtcagcagatggttgcgatggtgcgccaggtggctgtcgcggtagacgccatagggataccagaccgccagcggcagcgtccccaacagctggttaaaccatgccagccgggtgggatgcccatggatcagctcatgctgtaaggacatataccaggcggtaaaccagatcaacagcagcgtggccggaaacagtcccagcgtccgccagcccgccacgcaggcaaaccagccgccgtaaaccgtcacaatcagcagccaggtcggcagctcgctgcgccacagccagctgcgcgccagctggcggatcaggatgcgctgttggtcatccacatagacagccgtcttcttttccgtcacttccgataccttgccgtgttgcctcattcccaccgaagatgtgagataacacgttaaataacaaagtatttaattgacttagctttgccaaaaagcgcgtttgtgttcaacagggcaaagagaataccgtccatggcgcaacaggttggcggtgtttaaacaggcccatcgcccggcggcgctgcgcttgccgggcctacgggataacccctccccgggccatccaggccggtgcaggcgcagcgccgccggacaagaacagcggcgtcgcttttgtgccgggcggcggcgacaccttgcccggcctacgatccgtgcggcctgtcgttaatttatttaccgctgttgctgaaattttaccgccaggtcgaggatacttaaggactccagcgccttacccgccttcgcgccgacgatgccggcggagcgtcacagaggctactcctcttcccgctccgctggcgtccaggtcggcagagtctggaaggtgtgcaataggccttcggaccacgccttgcgaatgcggttgaagtagggatcgctgtcggtaatgcgatgctgcccggcgctgaagctgccgctgcggtagagcagcgtatccagcggcaggccgacggacagattactgcgcagcgtcgagtcaatggagatcaacgcgcagcacatcgcctgctccagcggcgtgtcgatggtcagcacccgatcgatgatcggtttgccgtatttgctttcgccaatctggaaataaggcgtgtcgcgggtggcttcaataaagttgccctccggataaatatggaacagacgatgggtttcgccggcgatctggccgccaagcagcaggttgcagttgaagttggtgttactgcaggtctgctggttgctgctgtcgcgctggatcacctccagcagcgttttaccgatcagcatcgcggcgtcgtagagggaagtgacctgcatcagattcggctcctgctgggtacggatgcgcgcgctgagcaggcttatcacgctctgggtggtggccagattgccggcggattgcagcaccagcacccgttccccctcctgatggaaaacgtgcagctttttaaaagtggcaatatggtcgacgcccgcgttggtgcgggagtcggaagcaaacaccagtccatccgccaggcacatggccacacagtaggtcattgcggttattcccgtattattgctgctgcgcctgctggctgtgttcgcgcacttcagcgttagttaacataatctccccgccgccgcccagccgggtgccccgtaccgggcaggcgtcgagataatccagcccggtcgccagccgtaaatgctgattcaggcgacgggtattattggtgatatcaaacgacagccagcggccgtcgagccagacttccgcccaggcatgcatcgccacatgctgggcgttatcgctgtagacatagccgctgacgtagcgcgccgggatctccagcgcgcggcagcaggcgagaaaaacatgggtatgatcctggcacacccccttcgcgcgggcgaaggcgtcggcggcggagtcctgcacctgggtcgcgccgggggagtatggcattcttaacagcagatccgccatcagttgattcagactctcttccgccgcatcgggacgatagaggcgctgggcaaactcacggatcgccgtatcggcgcgggttagcggcgtacagcgcagaaaaaccagcggcgacagcagctcggcctcttcatcacgcgtctcctccccttcgtcggcgatatcgacaatcccgctggcgcggatggtgatctccttgtgcgggttatccagcgtcagcacatgcagcacattgccccagccgtcggtagtggtcaccgccgcgccgtccggcagggtcagcgtccaggcggtgatcgtctgccgggcggtactgcgcggcgtcaggcgcagatactgggtggaaaacttcacttcttcatcgtagccatagcgggtgagatgatcgatgaccagtttcataaggcctccagataggtttgtctgatgctgtcggacagcgcgttaattctcgccagcagcccgttaagggtggtctgcaggtccgcctgcgccaggtcgtcacgggtgctgaagcgcagatcaacgttaagctgatgggcgaggcgcagcggttgataggagcggtcgttagcgatcttctccagctcgcccaccagatcggcaatgctggcgcgcagcgaacgcggaatatcgttgcgcaggatcagcagctccatcaccgtttcgcgactgaccggctggcggtagaggctgttgtaggcttcgcgggcgctgaccgcattgagcagggtatccagccggtagtattcccgcaccggatccgggtcgttggtcagctgttgatccttaatcagcagcagctgggtggtggcgaacgcgcgctcgatcagcgtgccgataccgataaaactcagggcgtcgttgcgcagcagcgtgccgatcactgccccgcgaaacagatgcacccgctctttcacccactcaaaaaagccgtcgctccccagctcgcccagcccctgctggcggagggtccgcagttcaatgcgggtggcattgatgctctcccacacttcggccgacagactgccgcgcaccgcgtgcgcgttgttccacgccatctccacgcagctgtaaatactgcaggggttgttgccatcaagggcaaaaaagttgagcagattgctcatggtaaagcgggcatggcgcgcctgaaacaactcgtgggtcatcgacaaattcagcggtagcgccagatcccgcgactgctggctgtggcgggggatcattgataatttccaggtcacgtccagcacccgggcgtagctctccgcccgctcgagatagcgggccatccagaacagttcactcgccgtacgacttagcatgatgcgtcatcctccatcacccaggtatccttggttccgccgccctgcgaagagttgaccaccagcgacccttcggtgagggccacgcgggtcaggccgccgggcaccagccgcatctcctgcccggacagcacgtagggccgtaaatcgatatgtcgcggcgatagaccttcctcaacgaaggtggggcaggtcgacagcgcgagggtgtcctgggcgatatagttggccggattggccagcaggcgctggcggaaggcctcccgctcctctttggtggaacgcgggccgaccagcatgccgtagcccccggcgccatggacctccttgaccaccatcagctcgagattgctcagcacgtagcgcaggtcctccgctttccggcactgccaggtggggatattgctgaggatcggttgttcgccgaggtaaaagcggatcatctccgggacgtacggatagattgatttgtcgtcagccaccccggtgccgatggcgttggccagcactacgccgccggcgcgatagacggacagcagccccgggacgccgagcatcgaatcggcgcggaaggccagcgggtcgagccaggcgtcgtcgatgcggcgataaatcacatccacccgccgcggcccctcggtggtgcgcatatacaccgcgccgtttttaataaacagatcggcgctctccaccagctcgacccccatctgctgcgccaggaagctgtgctcgaagtaggcgctgttgaagcgacccggggtcatcaccacgacgcagggatcatccaccagcgagctttcgcgcagggtctgcaggaggtagctcgggtagcgctccaccggcgcaatgtgatgctgctcgaacatctccggatagagacgcatcatcatcttacggttttcgagcatgtaggagacgccggacggcgtgcgcagattatcctccagcacgtagtactgaccgtcgttattgcgcaccatatcaacgccggtgatatgggcataggtattgtttggcaggttgatgccctgcatgcacggctgatactgctcgttggccagcacctgctcggccgggatcagccccgcgcgcaggatattctgctcatgatagatgtcatagaggaaggcgttcagcgctttcacccgctggcgtatgccgcggtcaatgcgctgccactccccggcgggtatgatccgcggcacgctgtcaaacgggatcagccgctcggtcccctcatcctcgccgtacacgttaaaggtgatgccgatacggtgaaaaagcagttccgcttgcgcttttttctgccggatagagaattgatcggtattgcgaaaccattgccaccaggcattatagtgcggccgctgttcaccctgcgcggtcagcatctcgtcataataatgcccgtcaggtagcgtaattttaatcatggctatcccctccggttgtactcactttgtggtaatcccgctaagagataagcattaattatgccaggtcctctgccgccgcggcgttgtgcaaatcggttcagccccgccgtctggttgtgcaaaaaatcgccaaaacagccgcccgcgcccggcggcggctgcaccgtcgtgaggcagggcgacgttttttgcgccatcgtggacgccagcgccctcagccaggcggcccagcccgcggcggtctcaggagacctggcaggtaaatcctctgttttcgcgcaaaatgttacccctgacacgcgcagcggcagatattcgtctaaggtttttggatggccaaacgtcgtggcccgcagtcgataatgataaggagaactccccatgacgagtactgatgcacgtcgtcccgctgctttgccctgttccctgcgcctggcgatcggcggcgctctgatcgccctgatgagcctgaacgctcaggcggaagacggcaaaaccgcgccgcccccctcgccggatattctgctgggcccgctgttcaatgatgtccagagcgcgaagctgtttgccgatcagaaaaccttcgccgacgctatccctaacagcgatccgctgatgatccttgccgattaccggatgcaaaaaaaccaggccagcttcgacctgcgccacttcgtcgaactgaacttcacgctgccgaaagagaacgacacctatgtgccgcccaaagggcaaactctgcgtcaacatatcgatggcctgtggccggtcctgacccgcagcaccgtcgaggtggaaaaatgggactcgctgctgccgctgcctaagccctacgtggtgcccggaggacgtttccgcgaagtctattactgggacagctatttcacgatgctgggtcttgccgaaagcggtcactgggataaagtcgaggatatggtcgccaacttcgccgcagaaattgacgcctggggccatatccccaacggcaaccgcacctattatctcagccgttcgcagccccccttcttctcctttatggtgagcctgctggcgacgcacgatggcgaccaggtgctgaaaacctaccagccgcagctggagaaagagtatcgctactggatggccggagcggacgcgctgcctcccggcagcgccgacaaacgggcggtgcggatggcggacggcgcgctgctcaaccgctactgggacgatagcgacaccccgcgtcccgagtcctggcttgacgacgtcaaaaccgccaaaagcaacccgaatcgtccggcaaccgagatctatcgcgacctgcgctccgccgccgcctccggctgggatttcagctcccgctggatggacaatccgcagcagctcgccaccattcgcaccacctcgattgtcccggtcgatctcaatgccctgatgttccatctggagaaaaccctcgcccgcgccagcaaggcatccggggacagcgctggcgctacgcagtacgatgcgctggctaacgcccgccagcaggccatcgagaaatacctgtggaatgataaagagggatggtacgccgactacgatctgaaaagccacaaggtgcgcaatcagttgaccgcggcggcgctgttccccctgtacgtcaatgccgcgtcacgcgagcgggcgacgaaagtggccgccgccgccgagtcgcgcctgcttaaacccggcgggctgaccaccaccaccgtcaacagcggccagcagtgggacgcccccaacggctgggcgccgctgcagtgggtggcggtcgaggggctgcaaaactatggtcagcagaagatcgccatggaggtcacctggcgcttcctgaccaacgtgcagcatacctatgacagtaagcaaaagctggtggagaagtatgacgtgagctcgaccggcaccggcggcggcggcggggaatatccgctgcaggacggctttggctggaccaacggcgtcaccctgaagatgttggatctgatctgcccgcaggagaaaccctgcgatgcgctgcccgctacccgtccggcgacaaccccttcaccgcaggacaaacctgttgcggcgcccgcggctaacgaccccgcccctgcggaaccgcaaaagactggctcctgacgctttgccgccccccctaccaaaatcggtagggggaagcggtctccctggtcactaccgtcccgtgcagacccattctgcggctcgcgggaaacacttccccaccccctcgcgttgaacaggtcaccttttcgcttgatcgcacaaatacaaacaataataattcgcattactttttaacgaataatgacagattcgtttttcacgcggcggcgtacaggagtaccagaccgcgttggttcaggatgatcttatgaacgtggctatttctcgaaaacgcccggggctgctgtatgcccttgcggtcgcactccccttcaccgcgcaagccgaagagacggtggtggtcactgccaccccgccggcgtccgccagcgcgccgacggagggctacagcgccagcacctcgctcggggcgacgaaaaccgaccagccgttaatcactaccgcccagtcggtgtcggtggtcacccgccagcagattgcggatcagggggcgaataccatcagccaggcgctggaatataccccgggggtctactccagcttcggcggcggcgccacccggttcgacgccatctccctgcgcggctaccacggcggcgacgtcgataacctgttcctcgacggcatgcgcctgatgagcgacggcggcagccataacgtattgcaaatcgacccgtggtttatcgaacgcgtggatgtgatccgcggcccctcctccgcgctctacgggcagagcgtgccgggcggcgtggtcaacctgacttccaaacgtccgcagttcagtcagcagggccacatccgcctgaccggcggcacgcaaaataccaaaggcgcggccttcgattacaccgacgccatcaatgaccagtgggcatggcggctgatcgggatgacccgcagcagcgacacgcagtatgaccatacccgcgaagagcgctacgcgatttcgccttccctgctgtggcagccggacagcgacacctcgctgctgctgcgcgcctatctgcaaaaagatccttccggcggctaccacggctctttgccgctggacggcacccgctacgcgcacaatggccgtaagctctcccccagcaccaacgaaggcgatccgggagatggctatcaacgccgccagcagatctacagctatgagtttgaccaccagttcaccgacgtctggtcggtctattccgccgggagctacacccataccaacgtctccctcgatcaggtctaccaggtcggctggatagatgacagcgacatgctggcccgcggctacagcggttcgcgcggttcgctggacggctggtcaaccgataaccgcctgcgcgccgatttcaatacaggcgacctggcgcacaccctgatcctcggcgccgaatatcatcggttccgtaacgacctgtggaccggcgccggcggcgcggcgccccttaacccgtttagcggctataccgcgcagaccggacataccgttacctacagcgacgacaataatcgccgctattaccagaccgggctgtatctgcaggatgagatggtctggaaccgctggcatgtggatgtttccgcccgctacgaccgcatcgtttcccagcaggtcagcgatacccaggggacctcaaaccgccgttcagacgaccatatcagcggccgcgcctcgctgttgtacgccctggacaacggtctgtcgccctacctgagctacagccaggcgatcaccccggcgatgctgccgggcgcggacggcaaaccgttgaaaccgaccaccgccgaacaggttgaagccggcctgaagttccagccgccgggcagcagcgatctctatagcatcgcgatttacgacctgacgcaaaaggatgtcgccactcgcgacccgaatatcgccaccgccacctatattccggcgggtaaggtccattcccagggcgttgagctggaagcgcaccaccagatcaccccgcagctgagtactatcgcctcgtatacctggaatcgtctgcgtttccaggacactaaagacgggaccgacaataacacgccgcagctgaccccggatcagatggcctccttctgggcgcgctatcagttcccggcggggatctccgttggcgccggcgtccgctacatcggtaaacagtgggcggatgatgccaacaccgcgcggctgccgtcggtcacgctgatggacgccatgatgcgggccgacctcggcgtctggtcgccaacgctgaaaggcgcttatgtgcaggttaacgccaacaatatcggcgaccgcgagtatatttccggctgctatggcaccggcaactgttactggggagcagagcgcagcgttatagccaccgtgggctacgatttctgaggacgtggcctccgggagactaccggaggccaaacgagggattacatggcgtccagcgctttctggagtttccagatataacgcggcgcctgcggtgccgggtgttttttcaccacatgttcgaagaactcatcggcgtcgagatcgttaatctcctcgatggcgtcctggcggttcgaggagaaggtacgcagcagcgcgccagcgccgttggcataggagaccaccaccgcatagcgcatcacctgcgggtctttgatccccgccagcggaccgttctccagaatgctcagataggcggcccccatcgagatattacgttccgggtttttcagctcactgaccgacggctcgccgcgccaccccatccgccgatagacatcgcgtccggaggtcgacggcttgagctgcatcagcccgacggcgccggatttactcaccaccgcaggattaccgcccgactcgatggcgatgatcgccgtgatcagctgcggatccacgccccaggcggcgccggctttttcactgatcggcatccactgcatcgcccgcttcaccgggacctcggggttccacggcgggttagtgtaatcatgtttcgaactacaaccggccagaaaaacgactaaaataagcaaccatctcaatttcacacatctatccttatctacccaaacgccatcatgctacagaacgacggccgcggtacatctcccgcctgccgacaacctgaaggatgacgggtgcggactgaagttagccacctggagatgacaatcgccattccaggcggcatcataaccctttcattcatagcaaggaattatcatgtctcagttttatctggtcgcgccatccgggtattgcatcaaccagcaggcggcagcccgcggcgtcgagcgtctgcagcaggccggacacgaggtggcccaccagcaggtcattccccgccggcagcagcgtttcgccgggactgaacatgaacggctggccgatattaaccagctggcccagttgcccggccgcaaccggatcgtcctcgccgtgcgcggcggctacggcgccagtcgcctgctgccgcatatcgactggcagggactggttgcccgccagcagcgtgacccgctgctgatttgcggccacagcgatttcaccgctatccagtcgggcctgctggccatgggcaacgtcatcaccttcagcgggccaatgctcgccggcaacttcggcgcggagaccctcgacccgtttaccgagcaccatttctggcaggcgctacgccagccggaattcaccctcgaatggccgggcgaagggccgaactgccgggtggaaggcaccctgtgggggggaaatctggcgatgctgacctcgcttatcggcacgccgtggctaccggcgatccgcgacggcatcctggtggtggaggatatcaacgagcacccgttccgcgtcgagcgcatgctgcttcagctgttgcacagcggtgtgctggcggcgcagaaagcggtgatcttcggcagcttcaccggcagcgcgccgaacgactatgacgcgggatacgatttgccgcaggtctttgattatctgcgccagcagctatccctgccgctgattagcggactggagtttggccacgagcagcgcacggtgaccctgccgctgggcgcccgcgcgcgcctggtgaatcaggcggcggccaccaccctgacgatcggcggccatccggtgctgacagaataaatttcccgaacgcataggcggatcccctgcgaattgttaaaatagtgtcacttttagccattttttcacgccagtcagggagtacgtgaacattggacgccgctgcggtcattagtctgtttattctgggttctgttttagtaacctgcagtatcttattgagctccttttcttcgcgccttggcatcccgattctggtcatctttctggccatcgggatgctggcaggcattgacggcatcggcggcatccccttcgacaactaccccttcgcctatatggtgagtaacctggcgctggcggtgatcctgctggatggcgggatgcgcacccaggccagctcctttcgcgtcgcgctgtggcccgcgctgtcgctggcgacggttggggtgctgatcacctcggcgctgaccgggatgatggcggcctggttgttcaagctggatctgatcgaaggcctgctgatcggcgccattgtcggctccaccgacgccgcggcggtcttctcgctgctcggcggcaaggggctcaacgagcgcgtcggctcgacgctggagatagagtcaggcagtaacgacccgatggcggtcttcctgaccatcaccctgatcgaaatgatccagcagcaccaaaccggcctcagctggatgttcgccgtgcatatcattcagcagttcggcctcgggatcgccatcggcctcggcggcggctacctgctgctgcagatgattaaccgcatcgtgctgcccgccggcctctatccgctgctggcgctgagcggcgggatcatgatttttgccgtcaccacctccctcgacggcagcggtatcctcgccgtctatctctgcggctttctgctgggcaaccggccgatccgcaaccggcacggcatcctgcagaacttcgacggcctggcgtggctggcgcagatcgccatgttcctggtgctgggcctgctggtgacgccctccgacctgctgccgatcgctatcccggcgctgctgctgtcgatgtggatgatattcattgcccggcccctgtcggtgtttgccggcctgctgccgtttcgcggctttaacctgcgcgaacgggtgtttatcagctgggttggcctgcgcggcgcggtgcccattattctcgcggtgttcccgatgatggccggcctggacaacgcccgcctgttcttcaatgtcgccttcttcgtggtgctggtgtcgctgctgctgcagggcacttcgctgtcgtgggcggcgaaaaaagccaaagtggtggttccgcccatcagctggcccatctcccgcgtcgggctggatattcacccggaaaacccgtgggagcagtttgtctaccagctgggggccgataagtggtgcatcggcgcggcgctgcgcgacttgcacatgccaccggagacgcggattgccgcgctgtttcgcaacaatgtcctgctgcaccccaccggcagcacccgcctgcgggaaggcgatatcctgtgcgttattggtcgagagcacgacctgccggcgctgggcaaaatgttcagccagtcgccgccggtggcgctcgatcagcgctttttcggcgacttcattcttgatgctgaggcccgcttcgccgatgtggcgcaaatctacggtctcgacggcggtgaggagttccgcgagcatcagcagtcgctcggggaagtggtgcagcagctgctgggcgcggcgccggtggtgggcgaccaggtggagttcgccgggatggtgtggacggtagctgaaaaagagaacgatcacgtgctgaaggttggggtgcgggtcgcggaagacgaggcggagtgatccgccccggaataggttacagggtcacaactggcacccgcggcgccagggcgcacatcagctcatagccgacggtgccgctgctggccgccacgtcgtcgattttaatctctttgccccacagctcgaccggcgcgccgatcccggcctgcggacaaggcgttaaatcgaccgccagcatatccatcgatacgcgtccaacggtggtggtgcgtacgccatccaccagcaccggcgtgccgctcggcgccacccgcggatagccatcggcatagccgcaggcgacgatgccgatccgctgctcctgggtggtgcggtacaggccgccatagccaatcgcctcgccggggcgcaggttctgcacgccgataatctcgctgcgcagcgtcatcaccggcttcagcccggtgttggcgatgtcctgccactgcccggaaggcgacgcgccatacagcacgatgcctggacgaacccagtcaaaatgcgcttccggatgccagagggtcgccgccgagttggccagcgagcgcgggcaatccagcccctccgccgcctgttcgatacggcgcatcggctcgacaattccctgcgggttctccgcctccgcgaagtgcgacatcagcgtcatctcgccgacgttgcttatcgcccgcagctgctgccagacggtgtggacccgctcaggcataaagcccagccggttcatgccgctgttcaccttgagatagatatccagcggcgcgcgcagcttcgcctgctgcagggccttaatctgccagttgctgtggacgctggtggttaaacgatattgatccagcaccgccagctcatcggcatggaagaagccctccagcagcaggatcgggcctttccagccctgctcgcgcagcaggatcgcctcttccaggttgagcaaggcgaaaccatccgccgcgcttaacgcactccatacgcgcgccacgccgtggccgtaggcgttggccttgaccaccgcccacaggcgcgacccgggggccgcgcgacgcactatctgtaaattctgccgcaaggccagcaggtcgatgctggccactaccggacgggtcatgcaagctccttagttgtgtgcgccgtgcaggtgctgcgggcgcgccggggtaaaaccggggctgtagcgggcaaccgccagatcgtcgtaagggatcgccggcgtgcggccggagatcagatcgctgataagctgcccggagccgcaggccatggtccagccaagcgtgccgtggccggtgttgagccacagatttttatacgctgtgcggccgaccaccggcgtgccgtccggcgtcatcggccgcaggcccgtccagaacgtcgcctgctccacgtggccgccgcgcgggaacagatcgcgcaccaccatctccagggtttcgcgacgcggctgcagcagcgttttgttaaaaccgacgatctccgccatgccgccgacccgaatgcgctgatcgaagcgggtgatggcgattttgtaagtctcatcaaggatagttgaaaccggcgcgccgtcctcctgagcgatcggaatagtcaatgagtagcctttcagcgggtagaccggtatatccaccagccctttaagcatcgccgtcgagtaggagccgaaggccatcacataggcgtcgcccttgataatctcatcgccgcatttcaccccggcaatgcgatcgccctcgtgcagcagcgcatccactgcggtgttgaagcggaaggtcacgccggcctgctccgccatcgccgccaaacgggtggtaaacagctggcagtcgccggtttcatcatttggcagacgcaggccgccggtcagtttgtggctgacctccgccagcgccggctccacctccgccaaccgcttcgcttccagcagctgatacggcacgccggcgtcctccagcaccgcgatgtcgcgggtggcattttcatactgtttggcggtacggaacagctgcagcgtcccgccctggcgcccttcatactgaatgccggtggtgtcgcgcagcgccttcaggcagtcgcggctgtactccgccaggcgcaccatacggcctttgttctccatatagtggcgggtgtcgcagttgcgcagcatctgccacatccacttcaactggaacgaggtgccgtcaagaccgatcgccagcggcgcatggcgctgaaacatccatttgatcgccttcagcggcacccccggcgccgcccagggcgccgcatagccgggagaaatctgcccggcgttggccgcgctggtctcctctgccggaccgggctgacggtcgatgaccgtcacgtcatgacccgcctgactcaaataccacgcgctggctaccccaaccaccccacttcccagtatgacgacacgcatagcgactccgtaacagttaaagaacaatcatctaattacaaattgataactcagttgaaaatattattcaacatacgctttatttatggtgacttaactcacagcaaaccgcaccagccctgcgctgtgagatttacgatctcatgctgcgctttatttttacccagcattaaattctgcaaataaggcaaaaaaacggctttgagatggggaaatcgcgaagaaaagcgattggcgtacagcacagtttgctgcaccgtgttctatgcttgtttagaggttttccgttcagagaaaaccaacaacaacgagggcgcgctaatggctacgattgactccatgaacagggacaccacccgtttaagcgatggacccgactggacgttcgagttactggaaacctacctggccgaagtggaccgggtcgccaagctctatcgtcttgacacctacccgcaccagatcgaagtcattacttccgagcagatgatggacgcctactccagcgtcggcatgcccatcaactatccgcactggtcgtttggaaaaaaatttattgagaccgagcaggcctataagcacggtcagcagggtctggcgtatgagatagtcatcaactccaacccctgtatcgcctacctgatggaggaaaacaccatcaccatgcaggcgctggtgatggcccatgcctgctacgggcataactcgttttttaaaaataactatctgtttcgcagctggaccgacgccagctcgatcatcgactatctgatctttgcccgtaagtacatcaccgagtgcgaagagcgctatggcgtcgacgaagtagagaaactgctcgactcctgccacgcgctgatgaactacggcgtcgaccgctataaacgtccgcaaaaaatctctctgcaggaggagaaagcgcggcagaaaagccgggaagagtatctgcaaagccaagtgaatatgctgtggcgcaccctaccgaagcgcgaagaggaaaaagcgattgaatccgctcgtcgctacccttccgaaccgcaggagaacctgctgtactttatggagaagaacgccccgctgctcgaaccgtggcagcgcgagatcctgcgcatcgtgcgtaaagtcagccagtatttctacccgcagaaacagacccaggtgatgaacgaggggtgggccaccttctggcactacaccatcctcaaccatctctacgatgaagggaaagtgactgagcgctttatgctggagtttctccacagccataccaacgtggtgttccagccgccgtacaacagtccgtggtacagcgggattaacccctacgcgctgggcttcgccatgttccaggacatcaagcgcatctgtcagtcgcccacggaagaggataagtactggttccccgatatcgccggttctgactggctggaaacgctgcatttcgccatgcgcgactttaaggatgaaagctttatcagtcagttcctgtcgccgaagatcatgcgcgatttccgcttctttaccgtgctcgacgacgatcacaacaattatctggagatttcggcgattcacaacgaagagggctatcgcgagatccgcaataagctctccgcgcagtataacctcagcaatcttgagccgaacatccaggtgtggaacgtagacctgcgcggcgaccgatcgctgaccttgcgctatgtgccgcacaaccgcgtcccgctggacaaaggccggcgcgaagtgctgaagcatgtgcatcgtctgtgggggttcgatgtgctgctggagcagcagaacgccgacggcagcattgagctgttggaccgctgcccggcgcggccgaacgcgctatagcattgcggggcgagtaaaataacaaagggggccattggcccccttgttctgtatatcgatcgcgaaaagcccgcttaacgcatattcatggctaaatcaccgggcagcgatttctgcatccggtgccagatctcgccgctgtcatggccgtagcgacgaaccagctcgtaaacctggtcatgcagaccggcctcacacactttcgccagctgatgatagaaaccgagcgccaggctgcgcgcttccgggctggagaaatagtggcggccgatgcgggtatacaaccccttcatgccgttgaggatcagaccgtagatcgggttgccggaggcaaacgccagaccacggaaaatattataatcaagctcggcgaaggcgtcggcgtgatcctccacctcccgggcgctgtccaggaccgccagcgctttatccggatgctggcgaaacgcggtgcggataaaaatcgtggaaatgttggtgcgcacggagagcagattatcaatcagctgcggtacgctgtcgtgatcgaggcgcgccagcgtttcgaggatattcaggccggaggtttcccaaaagttattcactttagtgggcttaccatgctgaatggtcagccagccgtcacgggccagacgctgcaatacttcgcgcagggttgtgcgggtgacaccgatcagctcagaaagctcgcgttcagcggggagaatcgatccgggagggaagcggttattccagatactctcaatgatgtactcttccgcgaaacccgcagggctctgcgccttaatgaccatagtaagatttccattacacagcgttacaattgcactcatcataccagagccgctatagcgcagatagcatggcaagtgaattaaaaagggatcgccgtttcattttccgcttttactttgcgcttttccttatcttcacaaaccgccagcgcggcgcgaagaaagttgcttctcattttgctcaactggtactcttgccaatcgttatgcacaaaaccatgcactcattgacggggaaggattctgtcgtggaaatttcttatggccgcgcgctgtggcgcaattttcttggccagtcgccggactggtacaagctggcattaatcattttcttaatcgtaaatccgctggtgttcgccgtggcgccgtttgtcgccggctggctgctggtggttgagtttatctttaccctcgccatggcgctgaagtgctatccgctgctgccggggggtctgctggctatcgaggcgctgctgatcggcatgaccagcccggcgcacgtccgggaagagatcgccggcaatctggaggtgctgctcctgctgatgttcatggtggcgggtatctactttatgaaacagcttttgctgttcgtgtttacgcgcctgctgctggggatccgtagcaaaatgctgctatcgctggccttctgcctggcggcagccttcctctcggcctttctcgatgcgctgacggtggtggcggtagtgatcagcgtcgccgtcgggttctacggcatctatcaccgcgtcgcctcggcgcgcccggacgatagcgacctgctcaatgacagccatatcgagcagcactaccgtgaggtgctggagcagttccgcggctttctgcgcagcctgatgatgcacgccggcgtcgggaccgcgctcggcggcgtcatgaccatggtcggcgagccgcaaaacctgattatcgccaaagccgcgggctggcattttggcgagttctttcttcgcatggcgcccgtgaccctgccggtgatggtctgcggtctgttaacctgtctgctggtcgaaaagtatcgcctgtttggctacggcgaaccgctaccgccgacggtgcgcaaggtgctgcaggagtttgacgatcgcagccgcgcccagcgcagccgtcaggagcgactgcggctgattgcccaggcgctcattggcgtttggctgatcgtggccctggcttttcacctggctgaggtcggcctgattggcctgtcggtgatcatcctcgccaccacctttaccggcgttaccgatgagcacgccattggcaaggcgttcaccgaggcgctgccctttaccgcgctgctgacggtcttcttctccatcgtcgcggttatcatcgatcagcagctgttcacgccggtgatcgagtttgtcctgcaggcctcgccgcacgcgcagctgtcgctgttttatctgttcaacggcctgctgtcgtccatttcggataacgtgtttgtcggcacggtctacatcaacgaagcgaaagcggcgctcgaacatggcgccatcagcctgccccagtttgagatgctggcggtagcgatcaacaccggcaccaacctgccctcggtggctaccccgaacggccaggcggcgtttctcttcctgctgacttccgccctggcgccgcttattaggctctcctatggccgtatggtgtggatggcgctgccctacaccatcgtactgacgctggtcggcctgttatgcgtcgagttcaccctgatgccagtcaccgactggctgctggcgcacggctggctggtgacgcccaccttgccctgagtcagtttttgcccgggttcgcccgggcgcatcaataacccgttacggaatattttccgccgcgcctctggcgtcggttcggttttcgtttacactgccatgatttagcatcttccagggaaatgattatgttgcaatatttaaaccagtgctcaagaggacgcggtgcctggctcctgatggcgttgaccgcttttattctcgaacttgtcgcgctgtggttccagcacgtgatgctgctgcagccgtgtgtcatgtgtatttacgaacgctgcgcgctgttcggcatcatgggcgcgggactggtgggcgctatcgcccccaaaacgccgctgcgctatgtcgccatggcaatctggttgtacagcgcgatacgcggactacagctggcgtgggagcatacgatgatccagctgcacccttcaccgttccagacctgcgatttcgccgcccgcttcccaacctggctgccgctggataaatggctgccgcaggttttcgttgcgtccggagactgttcagtacgtcagtggcagttcctgtcgctggagatgccgcaatggctggtggggattttcgccgcctatctgctggtcgctattctggtgatcgttgctcagcctttcaaagcgaaaaaacgcgatctgtttggtcgttaagccgcggcaagtccagcccataatgaaacgccctacggggcgtttttttatgcctcctgcgcatcgctgaatcgtttcatttctatggttgaccacagctgccaaaaggtgcatattaaatacatcttttaaaaccccacaggagctcacatgtcatctttactgatccccgcagactggaaagttaaacgctccaccccattctttaccaaagagaatgtccctgccgccctgctgagccaccacaacaccgcggctggcgtcttcggccagctgtgcgtcatggagggcacggtcacctattacggttttgccaatgaacaggcgacggagccggagaaaaaagtcgtgattcatgccgggcagtttgctaccagtccgccgcagtactggcaccgcgtcgaactcagtgacgacgcccgcttcaatattcacttctgggtggcggaagaaaccgacggtgaaaacgggctgttccacgcgaagaaagcgtgacggcgcttagcgcgccctgtcaggcagattaaggatatggtcctgccagtcgaccaccgtggactcaggcaccgcaatatggcgaacggagatgcgttcgccgtgcatcgccgcttttgagccagtcagcagcgggtgccaggccggcagaggcttgccttccgccagcaggcgataggcacaggtcggcggcagccattcgaaggtcggcagattttcgcgggtaagcttgatgcagtccggctcatactcaaagcgacgcgcgtagttacgacactggcaggttttgatattgagctgacgacaggcgacgttggtgaagtagatctcgtcagtgtcttcatccatcagcttgtgcaggcagcactggccgcagccgtcacacagcgattcccactccgcgtcgctcatgtcatccagtgttttttgttgccagaaaggttgttcgctcatcggagtgtccgtcgttgccagttaagggtgcaccttataaccagtctggcacgccgatgcaagttttgccgccccaaaaggcggcaaatagcgcttacagcacgcgggtagtgagcgccaggccgttgaagccgacctccagctcgtcaccgctgtgcagcggccccacgccttccggggtgccggtgaggatcacatccccggctttgagggtaaagaagcgcgacatataggcgatcagcggcacaatcctatggatcatgtcggcagtggtgccctgctggcgcacttcgccattaatcttcagacttaacgacgtattctgcgggtcgccgtggaactcagcggccgggataaagccggagatcggacaggcgttatcgaagcctttggccttctcccagggttgtcccgcttttttcattttcgcctgcaggtcgcgcagcgtgagatccagcgcgacgccatagccggcaatccctttcagcacatgctcttccgtcgcctgacgcagcgtgctgccgataagcaccgccagctcgacttcgtgatgcaccgagcccagcccctcaggaagcaccaacggctgacgaagatcgcacagcgcagtctcaggtttaataaacagcaccggctcttccggcgtcgcactgcccatttccttgatgtgtttcgcataattactgccgacgcacactactttgcttactggataatccagaagcgcaccctgccagttatgatgttggtacattattttccctcgtgggttaatcggattgtttcccctgttccgccaggtgtttctttagtagattttcagacggcggaggcagttgcaggtaatagccctgttcgcttaacgcctgtttcactttttccagatcggcgttaaccagttttttgcgcccatccagcggcagcagcatcgccatttgcggcgtgccaaagctgcgcattagctcgtcaggaacgcgcgagaaatcgtcctttttttcgacgtataaataggtttgttcacgtttagtacttcgatagatcacacaaaacatagttttactcggaattagacccgtggtcacttgcctcaatatatgagtgactataacatgccttttagtcttcggaatatcaccgcacttcggcggttgataaacagcaaattgagtaaggccaggatgtcaaatacgccaatcgaacttaaaggcagtagcttcacgttatctgtcgttcatttgcacgatgcaaatcccgaggttattcgtcaggcgttagaagacaaaatcgcccaggctcccgcttttttacgtcatgctccggtggtggtgaatatcgccagcatcgaggaggaggtggaatggcgcgccatcaacgaggctatcgccgcgaccggtttacgtattatgggcgttagcggatgcaaaattccgcgcctgaaaaccgaaatcgaccgcgccggcatcccgttattaaccgaagggaaagaaaaagcctctcgtccggcaccgtccgaacccaccccgccgccgccagttgctagtcagatcacaaaaacgcgtttgattgatcagccggtacgttccggtcagcgcatttatgcgccacactgtgatcttattgttacaaatcatgtgagtgccggtgcggaacttatcgctgacggaaatatccatgtatatggcatgatgcgaggacgtgcgctggcaggcgccggtggcgacagagacgcccagatattttgtacccaccttgcggcggagctggtctccatcgccggggaatattggctgagcgataacatcccggccgaattttatggcaaagcggcgcgcctgcgtttaggtgaaagcgctttggcaattcaaccgttaaattaatccctttttaacaaggaatttctatggcacgcattattgttgtgacttcgggtaaagggggcgttggcaagaccacctccagcgcggccatcgctacaggtttggcccagaagggaaagaaaaccgtcgttatcgacttcgacatcggcctgcgtaacctcgacctgattatgggctgcgaacgtcgcgtcgtttatgatttcgtcaacgtcattcagggcgatgccacactgaaccaggcgctgattaaagataagcgcacggaaaatctctacattctcccggcttcccagacccgggataaagacgctctgactcgcgaaggcgtcgacaaggttctcgaagaactgaagaaaatggaattcgatttcatcgtctgtgattccccggcaggcattgaaaccggtgcgctgatggcgctttactttgctgatgaagccatcatcaccactaacccggaagtctcctccgttcgcgactccgaccgtatccttggcattctcgcctctaaatcccgccgcgcggaaaatggcgaagagccaatcaaagagcatctgctgctgacccgctacaatccaggccgcgttaataaaggcgatatgctgagcatggaagacgtgctggaaattctgcgcatcaacctggtaggcgtgatcccggaagaccagtcagtcctgcgcgcatccaaccagggtgagccggtgatcctcgatgccgcctcggacgcaggcaaagcctatgccgataccgttgaacgtctgctcggagaagaacgccctttccgcttcattgaagaagagaagaaaggattcctcaaacgcctgttcggaggataaattatggctttactcgacttttttctctcgcgaaaaaagaacacggctaatattgcgaaagaacgcctgcaaatcatcgtcgccgagcgccgccgcggagacgcggagccgcattacctgccgcagttacgcaaagatatcctggaagtgatctgtaaatacgtacagatcgacccggagatggtcagcgtgcagctggagcagcgggacggggatatatccattcttgagctgaacgtgaccctacccgaaacggaagagtcgaaatcctgacctgtcgcgctatcgcgaaaaaaaaccggctacgccacgcgccgccggttttttaatggtctgaaccaggccgcgaactagcgcggatagtcgtttaacagcctcttcagccgctcggccatcagctccccgcgccaaccggaaatcagctcaggttcaccggcttgcgttttcagctgccagtgccagttcagcagctggttgatctgccgacgcgacgccagcagctccgcgcttacgcccttctccgtgctcacttcctgcaccagcgctttaatatctttaaaggctttgcggtagcccggcatgtcgatcaggttctgcagcggcgccggcagggccgactccggcagcgcctgcgctttttcgaccaggctaatcagcgttttgccgtggaagcgaatttcgctaccggacaacccgaggctgtcaagctcgcccaggctggtgggcatatagcgcgccacgctccacagatgctcttcccgcaccacaaagtttaccgccaggtcgcgctcgcgcgctttgcgcaggcgccactccgccaacagctgtagacaacccagctggcgggtacgcagctgccaggcgttgccgatatcgcgccaggcctcggccgggtctaccacctcctgacgacgctgctgcatcacgcggcactcgtcgagcgccgccggcagccagccagcgcgatcggtctccgccattaactggctggcgatcggcagcagataccagacgtcggccgcggcatattcacactgacgctcagtcagcgggcgcgccagccagtcggtgcgggattcgcttttatccagcgctaccccggaatactcttccaccatcgaggcgaagccccaggacattgggcggccgcagaaggccgccaggatctgggtgtcaatcagcggctgcggcatcaggttaaatgcattaaggaagacttctaaatcttcgctgccggcatgcaggtatttagtcacatcctggttgagcagcaggtcgcgcatcggcgcccagtcgttaatcgtcaagggatcgatcagagagacctgctggccgtcgaacagctgcagcaggcccagctgcgggtaataggtgcgggtgcggacaaattccgtatccagagcgacggcggaggccgtgcttgccgcttcgcagacagcgcgcaggccatcgtcggtggtgatcatctgatagttcaaagcatactctcttaacttgcgcccataaaaaacgccggcgtagccggcgtcaggcgactcattcgttacttagcctttattgtccactttagcgcgcgcttcgtcacgcagttctcgccgcaaaattttcccgacgttggatttcggcagttcgtcacggaattccaccagcttcggcaccttgtatccggtcaaatggcgacggcagaacgtaatcagcgcctcttcggttaacgcagcatctttcttgactacgaaaatcttcaccgcttcgccgctgctgcctgacggcacgccgatggccgccacttccagcaccccgctatgctgcatgaccacatcttcgatttcgttcggatagacgttaaaacccgacaccaggatcatatcttttttgcgatcgacgatgcgcaggaacccctcttcatccatcaccgcgatatccccggtgtgcagccagccgtctttgataatctcatccgtcgcgtcagggcgctgccagtagcccagcatcacctgcggccctttaatacagagctcgcccggctgacccggcgccacttcgttatcatcatcatccaccagtttggcttcggtggaaggcaccggcaggccaatgctgccgctgtggtagtcaatatcgtgcgggttaacgctgaccagcggggaacactctgtcaggccgtagccctccagcagatattgcccggtcagttttacccagcgctcggccaccgcctgctgcaccggcatcccaccgccggcggacaaatgcagcgaggagaaatcaagctgctggaactctttgttgttcagcaaggcgttgaacagggtattgaccccggtcatggcggtaaaaggatacttcgccagctccttcaccagcccggggatatcgcgtgggttggtgatcagcaaattttgcccgcccagttcgataaacagcaggcagttcatggtcagggcgaaaatgtgatacagcggcagcgcggtcaccacgaactctttgccgcgatgcagcagcgggccgtaggtggcattgacctgctcgaggttagccagcatattgcggtgggttagcatcgcacctttggccacgccggtggtgcccccggtgtactgcagaaacgccagatcttccgcaacgatctccggcttgacgtactgcatgcgatagccgtgctgcaacgcgctgcgaaacgagatggcgtccggcaggtggtacttcggcaccaggcgcttaatgtacttgaccacaaagttcaccagcgtgcctttggcggtggaaagctggtcgcccatgcgcgtcaggatcacatgctggacctgagttttcgccaccactttttccagggtatgggcaaagttggagactatgacgatcgccgccgcgccgctgtcgttgagctgatgctccagttcgcgcggggtatataaggggttgacgttaaccacgatcatcccggcgcgcaggatgccaaacagagccaccggatactgcagcaggttaggcatcatcagggccacgcgatcgcccttctgtaaccccaacccctcctgaagataagcggcgaaggcgcgactacgctcctccagcttacggtaggtcatcactccacccatattgataaacgccggttggtcggcgtaacgggtggtggcatgttcaaacagttcaaccagggattgatagcggtcaggatttatctccgccggaacatctgcgggataacggtttagccaaacctttttcactgcatcacctctgaaatagttattcgtcgtcatcacagcccctggataatacattttgttaacattatattaactcagcgtaccagtttattaattaggcaatgagcaggttgcgaagcgcgtcactattttttttcttattcgactgaaaacaaagaaacagcggaccggccgctgtttctttgaactaacataaacaacaaaatcattcggttacaacgtttctcacctcagcagggccgggattgtaccagccccagccgccatagccgtagccccaggggcgcggacccagcatccacgggtcgataggttgcggaggcatcaccacctgctgcactacgttccagcgcttgtagccggtggcgttcatcagcataaattgatacggcgtgctgcccaccttgccgtcaaccaccccggcgatcggtccgaccacggtcactagttgaccgcggaaatccaccggatcgaggaagccattgacgtcagcaaaaatccttccgcgggacggctcgcccagcactggccgcgcgccgctgtccagcggtacggtggcgatttctaagcgggttttcccctgctggttttgcacattgaccaccttaccgccaaagcgcgcttcctggccaacgtacagctgcggggcgttcatcacccgcactaaatcctgctgcggcgtcgggctggtgcctttgatggcatccggcactgacacgcagccgcttagcgcaacggcaaccgctgcggccagcagccagcgaacgccctgtttttgacccgccatgatgcgactccttttctcagtcttcttgttactgagattcactcgcggcctggaagtttcttccacgccacctcgtttcgcaaataaaccggctccgctttctccacggccacggttttccccgccgccagcaggtaacaggctaacggcagcatatcctccgccgccggcaattcaatttcgccgctgcttaaggtcagtccgctcgctttcgccagatccggccacgcctgccatccggtgccgacggtggcccattcgccggaaagctgtgccagtcgttcggctaccgcgtccggtttgagcaccgcttccgtctcttcgccatgccagacgccctgctcgtcgcgctggtactcggcccagtagacttcgcccatacgcgcatcaatggccgccagcacacgggtggcgccggttttgcgccaggcgccctgcgccatggtggccagcgtggaaacgccaatcattggcagttcggcgcccagcgccagcccctgagcgataccgatgccgatgcgcacgccggtaaagctgcccggaccgcggccaaaggccagcgcgtccagctcgctcagcgtggtgccgctctcggtgaggacctcctgcaccagcggcaggatacgttgggtatgttcgcggggacaaatttcgaaatgagcactaagggtgccatcattccacagagccgcggagcaggcctctgtggcggtatcgatagccaaaattcgcatgggtggtcacgctctcgttacatagttcaggccttcaggcagcctgatttccggcaaacggccaacccgccgccatgccgcccgaagtctattgggaaccgctaattaacaaaatggcgcgcagcttaacacattttagtgcggattaccttgccggcggtacggcgagaaagcgcaccgcccgacggatatcgcgggttcgcggcgccggcggcagactggccaggaacaccgcgccgtaggggcgcatcaccagccggttgtcgcagatcaccagcaccccgcggtcgtcgatatcgcggatcaggcgacccaccccctgcttgagggtgatcaccgcatccgggagctgcacttcatcgaagggatcgccgccgcgcagccggcaatcttccatccgcgcttttagcagcggatcgtccggcgaggtgaacggtagcttatcgataatcaccagcgacagcgcgtcgccgcgcacatcgactccctcccagaagctgctggtagccaccagcagcgcgttgccggcgctgacgaactgctgcagcagctggcctttactggtctcgccctgcagcagcaccggtagcgtcatggtggcgcggaactgctccgccagatcgcgcatcatggcgtacgaggtgcacagcataaagcagcgaccgtcgttggcctcgatcagcggcttgagcatcgccgccaggtggcgcgccgcgccgggctggttcggcaggggtaggttgcgcggcacgcagagcagcgcctggtgctgatagtcaaagggactcggcagcagcagagtctgcgcctcgtcgatccccagccgggcggtaaagtgatgcagatcgtcgttcaccgacagcgtcgccgaggtaaagatccagctccccgacttctgcgccatcacctctttaaacttctcggccacggtcagcggcgtcagcgcgagagtaaagtggcgcgaggtacactcataccagtagctgtagcccggctggttgatctctttcaaccgcttcaggcgcccgcgatagagggtggcgcgctcaaaagcggcgtcgagcagcgccgagcgacccagcgaaagtttggcgacgtcatagcatagctcgagcgcgtcatcgagcagcagcagcgctcgctgaatgtggctgtccgccagcagctcgcgcagattgccgcggtagcccgggtctcccagctgcaggcggaaatcctgcgcgctttgcgccaggcggtcggcgcatttttgcagctgctgagtgtctttcagttcggtgcggtaggcaatggtgatgtctttcgccaggtccagcagctggcggctggagagcgactggccaaagtactgactggcgatatccggcagctgatgggcttcatcgaagatcatcacttccgcctcggggatcagctcggcaaagccgctctctttgaccaccatatcggccagaaacaggtgatggttgaccaccaccacgtcggcgtccatcgcttttttacgcgccttcaccacgaagcaatctttatacagtgggcagtcgctaccgagacagttatcgttggtgctggtgaccagcggccaggcctgagagtcttccgcgacgctggcgcaggtgctgatatcgccatcctgggtttgattcgaccaggagcgcaggaggatcacatcgctgagggtttgcaccggcagatcgccgcccgccagcgcctgctgctcaagacgttcgagacacaggtagttggagcgccctttgagcagcgccagtttcccggtgaatttgagcgctttggcgacggtgggcagatcgcggctgtaaagctgatcctgcagcgctttcgagccggtggagataatcaccttttttttcgcccgcagcgcaggcgccaggtaagcgtaggttttaccggttccggtccccgcttccaccaccagcggccgggaggcctcaatcgcttcgctgaccgccaccgccatctggcgctgcggctcgcgcggtttaaatcccggtatggctttggctagctggccgtctgctgcaaaatcgtcgatcacattgccccctggttatttggacagtgattatgtcagggaggacggcgtttcgccagtccgggtagtgacgcgagcggcacattatggcagtcttgccgcagccgaatggaatgcttaaagaggaaaagcaatgacaattacgcgtattgatgccgaagcccgttggtcagacgtggtgatccacaaccagaccctgtactacaccggcgtgccggcaaatctcgatgccgacgctttcgagcagaccgccaataccctggcgcagattgacgcggtgctggaaaaacagggcagcgacaagtcgcgtattcttgacgccaccatcttcctcgccgataaaagcgactttgcggcgatgaataaagcctgggacgcgtgggtggtggctggtcacgccccggtgcgctgcacggtggaagcgacgctgatgaacccgcagtataaagttgagatcaaaattatcgccgcggtgtaattactcgtcctcatcctcatcttcaaagcgcgcaacgatctgctcgccggtatgcgttgcgcgcagctcttccgccaccagggcaatcgcctggccgctgcttatcccctgagccattagctcatggatacgttcgaccgctttttgctgttgctcgtggctcagcgaaggtaaacctgcaaacatcttttactcctgctacattgtggggcgtaattatttcacgccgtccccaactacgccagaggggcggtaacgttcaggatcgagaaagatgttgtcccccgcgattattaccctgccctggcgcccggatgcggccgaacactattttgcgccgttaagcgccctgccctgggcgatgctgctgcattccggctttgccgaccatccgcataaccgctttgatattctggtggctgccccgcgcgccacgctgctgacgcgcggtgaacagacgtgggtcgacgacggcgaaaccgttgttgtctcagcggaagatccgctgcagctcctgcagcagcagttggatcgtcagccgttcacgccgcaaccccatgacgatctgccgtttctcggcggcgcgctgggattattcggttacgacctgggccgtcgctttgagcgtctcccttcgcacgcgcaggccgatatcgcgctggcggatatggcggtggggatctatgactgggcgcttatcgtcgaccaccagcgccaacagatatcgctgctcagctatgacgacccgcagcagcgtctacagtggctggaggcgcaaacgccgacgccgggtgaaaccttcgccctgacctctgcctggcagtcaaatatgagccgccagcagtacggggaaaaatttcgccaggtacaggcctatctgcacagcggcgactgctatcaggtcaacctcgcccagcgttttcaggccagctacgtcggtgatgaatggcaggccttccgccagctgaacgccgtcaaccgcgccccctttagcgcctttattcgcctcgatgaaggggcgatttttagcctgtcgccggagcgctttatccagctgcgccagggggagatccagacgcggccgataaaaggcaccctgccgcggctcgattcgccgctggcagatgcgcagcaggctgagaagctggcgaattcgccgaaagatcgcgccgagaatttaatgattgtcgacctgatgcgcaacgacatcggccgcgtcgccgtcccgggcagcgtgcgggtccccgagctgttcgtggtggagccattcccggcggtccatcatctggtcagcaccatcaccgcccgcctgccaatgacgctgcacgccagcgacctgctgcgcgccgcctttcccggcggctcgatcaccggcgcgccgaaagtgcgggcgatggagattatcgatgaactggagccccaacgacgcaacgcctggtgtgggagcattggctacctgagctattgcggcaatatggataccagcatcaccattcgcaccctgacggcatggcagggacagctgtactgctccgccggcggcggaattgtggcggatagcgaggaagcggcggaatatcaggaaacttttgataaagttaatcgtatcctgcagcaactggagaactagaccatggcggatcgcgcccttaatctggatgattttctgtcccgctttcagcttctgcgcccgcagccttcgcgccatgcgctcaatcagcggcaggcggcggtgctggtgccgatcgtgcgccggccgcagcccggcctgctgctgacccagcgttcgccgctgctgcgcaagcacgccggccaggtcgcctttcccggcggcgcagtagataataccgacgcgacgcttatcgccgccgccctgcgcgaagctcaggaagaggtggcgatcccgccggaggcggtcgaggtgatcggcgtcctgccgccggtggacagcgtcaccggctttcaggtgacgccggtggtgggcattattcccccggatctgcactatcacgccagccaggacgaagtctccgcggtatttgaaatgccgctcgccgaagccctgcgccttgggcgctaccatccgctcgatatccaccgccggggcaacgaccaccgcgtctggctctcctggtaccagcattattttgtctggggaatgaccgccgggatcattcgcgagctggcgctgcaaattggcgcacgtccttagctatactgataatgagagggcgctctcattattagtaaaatcgcggttagccattagtttaattcatgtgaatagttgaactgacagggcgcttccctcttacactatgcgcagttattacatcgttaccgcacccgcggtaaccctgtcaggagtattatcgtgattagtctattcgacatgttcaaggtggggattggtccctcatcttcccacactgttggcccgatgaaggccggaaaacagttcgtcgatgacctggtcgaaaaaggattgcttaatgcagtgactcgtgtggcggttgacgtctacggttcactgtcattaaccggcaaaggccaccatacggacatcgccattatcatgggactggcgggcaatcagcccgatacggtcgatattgacgcgatcccggcttttatccgtgacgtcgaagcgcgcggtcgtctgctgctggccaacggccagcacgaggtcgacttcccggcggatgacggcatgcgttttcgtagcgacaacctgccgctgcacgaaaacggcatgaccattcacgcctgggccggcgagaaagagatctactgcaagacctactactcgatcggcggcggctttattgtcgacgaagagcacttcggcaaggaaaacgccaacgaactgcaggtgccctacccatttaaatcggcgcaggaaatgctggcctactgcaaagagactggcctgtcgctctccgggatggtgatgcagaacgagttggctctgcacagcaaaaaagagatcgaggattatttcgccaacgtctggcagaccatgcgcgcctgtatcgaccgcgggatgaacaccgagggcgtgctgcctggcccgctgcgcgtaccgcgtcgcgcctcggcgctgcgtcgtctgctggtggccagcgataagctctccagcgatccaatgaacgttgttgactgggtcaatatgttcgcgctggcggtcaatgaagagaacgccgccggcggtcgcgtggtaaccgcgccgaccaacggcgcctgcggcatcgttccggcggtactcgcctattacgatcactttatcgagtccgtcagcccggagatctatattcgctactttatggcctgcggggcgatcggcgcgctgtataagatgaatgcgtccatttccggcgcggaagtcggctgtcagggcgaggtgggcgtcgcctgctcgatggcggcggcgggactggctgaactgctcggcgccagcccggaacaggtttgcgtggcagcggagatcggcatggaacacaacctcggcctgacctgtgatccggtcgccggtcaggtgcaggtgccatgcattgaacgtaacgccatcgcctccgtcaaggcgatcaacgccgcgcgaatggcgatgcgccgcaccagcgaaccgcgcgtctcgctcgataaggtgatcgagaccatgtatgaaaccggtaaagacatgaacgccaagtaccgcgaaacctcgcgcggcggcctggcgattaaagttcagtgtgactaaacttttcgtgcccctctgcgcccgcaaagcgcgcagggggataaccctggtgactgaaatctccctgatgcgccttcaacggcgcattttcttttttctatacctggcgatattctgccactacacttgctctatcaaataagccacgcttaaccactcgtcctgtcgacagggtgtcgcacatgcagactgcacaaaaagtcattacggcctatcgtcacaaacgcattattgtctgcctgctggtagccctggcgaccctgggcgccacattagccatccgatttatttcgcagcgcagcgtaaatgaagattatattcgcacggccgccagccaacgggtggcggcgctcaatgacatcttgcgcccgctaagcgcgcagcgagccaccctgctccctctggtgggcaaaccctgccctgatatccatctgacgctgcgcaaaatggcggcctcgttgcaaaccattcgttccgtcgccctcgtcacgtcaggtatcgtttactgttccagtatttttggcccgcgacaggcagacttacatcgcctgcagcccgcgcttcctgcgccccgccctctgctgctcttctcgaacgacagctccttgctcaaaggctcgccggtactgatccaatggtatccagccgcggagaacggcctggacggcgtgatgctggtggtgaatattgagctgctgggaaccttaattcttaatgaaaaatcggccctgatcagcgacgtcagcctgcaggttggcgatcgttattttagcagccgccatgggcttctcgaaaaagcgcatgtcccgcagggcacggtgatttatcgccagcgctctacggagtttccgtttactgtcaatattaacggccctggcgcctcggcgattgcgcttgaggagctgcccggcgagctgccgctggcgctgatttttagcctgctaatgaccggcatcgcctggctggccaccgccggcagaatgagtttctcgcgggaaataagccttggcatttcggcccgggagtttgccctctggtgccagccgctgcaggatgcgcgcagcggccgctgctgcggggtggagatcctgctgcgctggaataatccccgccgtgggacgatttcgccggaggtatttatccccatcgccgaaggcaataatctgatcatccctctcacccgctatgtgattgccgaaaccgctcgccgcctggacgcttttcctcgcgaccgccattttcacatcgcgatcaatgtcgccgcgcgccatttcgctaacggactcctgctgcgcgacctgcacaattactggttcagcgtggatccggtgcagcagctggtggtcgagctaaccgaacgcgatgtcctgcaggatggcgaccagcatatggccgaacatctgcactttaaaggcgtacagctggcgatcgatgattttggtaccggcaatacttcgctctcatggctggaaaagctgcgcccggacgtcctgaagatcgaccgctcgttcaccagctcggtcggcatagatagcgtgaacgcgacggtgacagatattattatcgccctcgccaaccgcctgcatattgttaccgttgccgaaggggtggagacgctggagcaggaaaactacctgcgtagccacggcgtcgatgtgctgcaggggttttattatgcgcggccgatgccggtggaggcgttcccggcgtggctggccagcagggaggagagtgagagtgagggtgagagcgagacgacagaataactcgccggccgcagcggccggcgagcctggcgattactcttcttcgtcgctcggcggccgagtgaccaccgcgcgcaccagatcgacccggtaatcattcgcttccactacggtaaaatgcagcggcggaagcgacacgacgtcgccaatgcgcgggatatgaccattggcggagatcaccagcccggcaacggtggcaatatcctcatcgtcattgatcagtggatccagccccagcgcctgctgcagcgcatgcaggtcggtcgaccccttaataagccagccatcgccatcgatgacaatctctggcgtctcatcagcgtccgggaattcaccggcgatggcttcaaggacgtccagcggcgtgaccagcccctgcaccacgccaaattcattagttacgatgacgaagctgccgcgcgcccgacgcaggaccccgagcagattgatcgggtccagcgtttccggaacgacaattgccggggaggcagaagccagcgccgcgacgttttcccccgactccagggccaccagcatctctttcgcccgcacgataccaatgatttcatccagctctccgcggcagaccgggaagaggctgtgcggcgacgacagcagctgacgacgaatttcatcttcactctgttcagcgtcgacccagctgatttctccgcgcggggtcatgatgctgcgcagggagcgctgggccagggtcagcacgccattaatcatgtagcgctcttcttccgcaaaggcgccctcaggaacgggcaccgcggctggactgtctgcgtcatggctgacggaggcctgtttgcggccgcccatcaggcgcaggatggcatccgcggtacgagcgcgcagcggcagcgtcgactggtggcgaacaaagttacggcgcgccacctggttaaagaactcgataatgatcgagaaaccgatcgccgcgtacagatacccttttggaatatggaagccaaacccttccgccaccaggctaaggccaatcatcaacaggaagctcagacagagcacgaccaccgtcgggtgctggttgacaaagcgcgtcaacggcttggaggccagcagcatcaagatcatcgcgatcaccaccgccgccatcatcaccggcagatggttaaccatcccgaccgccgtgatcacggcgtccagggagaagacggcatccagcaccactatctgcaatactactacccagaaactggcatagcctttaccgtgaccggcatcgtgctggcggttttccagccgttcatgcagctcggttgtcgccttaaacaacaagaagatcccgccgagcagcatgatgagatcgcgcccggaaaaggagaaatcggcgatggtaatcagtggtttcgtcagcgttaccatccaggagatgaccgacagcagtcccaggcgcataaccagcgccagtgacaggccgatcagacgcgctttatcgcgctgcttcggcggcagtttgtccgccaggatggcaataaacaccaggttgtcgataccgagcacaatttccagaacgataagcgtcaacaggccggcccagattgagggatccattaacaattccatgtacgactccggtttgcggcaaggtcagtcatcgccatgccatgcaggggcgcgacaccaggtgctgaaagaaatgcgggatacgtagaggtggcaatcagatgccagaaagtgaaaagacgtcgatgacggtccatactgcgggctatgccctatactcctgagtaattaaacggaagttaaacatagcaaaatatagatcgaaattggaaataatttacctgaatttgcaataactaaggctattttttgcgctgcaaaattattcgcagacgatacgtgattaacggatcttcatcacattaattattttttcactgtctaaaataattcgcggtagtaactattctctatcttacaccctaactgaatcgattttgtcctcaagagtgattcaggatgtatcaaagcagatgatgcattcacgataataaaggaggtagcaagtgacgattgctattgtaataggcacacatggttgggctgcagaacagctgctgaaaacagcagaaatgctgttgggcgagcaggaaaacgttggctggatcgatttcgttccgggtgaaaatgccgaaacgttgatcgagaaatacaacgcccagttggcaaaactggataccagtaaaggcgtgctatttctcgtcgatacatggggaggcagccctttcaacgctgcgagccgcattgtcgtcgataaagagcattacgaagttatcgccggcgtcaatatcccgatgctggtagaaaccttcatggcccgcgacgacgatccttcctttgatgaactggtcgccttagcggttgaaaccggcagcgaaggcgtgaaagcgcttaaagccaaaccggtggaaaaagcggcccctgcgcccgcgcctgccgcagcgccaaaagccgccgcaccggccaaacccatgggcccgaacgactacatggtaattggccttgcgcgtatagacgaccgtctgatccatggtcaggtcgccacccgctggaccaaagagaccaacgttacccgcatcatcgttgtcagtgatgaagtggccgcggataccgtgcgtaaaactctgctgacccaggttgcgccgccgggcgtcaccgctcacgtggtggatgtggccaaaatgatccgcgtctacaacaaccccaagtatgccggacagcgcgttatgctgctgtttactaacccgaccgacgttgaacgtatcgtcgagggcggcgtgaaaatcaccagcgtcaacatcggcggtatggcgttccgccagggtaaaacccaggttaacaacgcgatttcagtcgatgccaaagatattgaggcgtttaaaaagctgaacgcccgcggtatcgagctggaggcacgtaaagtgtccaccgacccgaaactgaaaatgatggatctgatcgctaaggttgataaataacccggcggatcgcgccccagttttcactttaagacttaatcaacaggagaagtacaatggagattacccttcttcagattgtgctggtgttcatcgtcgcgtgtattgcgggtatggagtcggtacttgatgaatttcagttccaccgtcccctgatcgcctgtacgctgatcggcgccgttctcggcgatatgaaaaccggtattatcatcggcggtacgctggagatgatagccctgggctggatgaacatcggtgcggcggtagcccctgatgccgcgctggcgtccattatttccaccgtcctggttattgccggccatcagagtatcggcgccggtatcgcgctggctatcccgctggcggcggcaggccaggtgctgaccatcatcgtgcgcaccatcaccgtggccttccagcacgcggcggataaagcggcggagaatggcaacctgactgccctgtcgtggctgcacgtctcgtccctgttcctgcaggcgatgcgtatcgctatcccggccgttatcgtggcgatttccgtcggcaccagcgaagttcagggcctgctgaatgctatcccggaagtggtcaccagcggtctgaacatcgccggcggtatgatcgtggttgtcggttatgcaatggtcatcaacatgatgcgcgcaggctatctgatgccgttcttctacctcggcttcgtcaccgccgccttcaccaacttcaacctggtggccctgggtgtgattggtgcggtcatggcaatcctctacatccagctgagcccgaaatataaccgcgtcgccggtgcgccggctcaggcggctggtaacaacgatctcgataacgaactggactaacaggtgagcgaaatggttgatatgactaaaaataccaccgagaaaaaactcacacagagtgatattcgtggcgtgttcattcgttctaacctgttccagggttcatggaacttcgaacgtatgcaggcgctggggttctgcttctctatggttccggcgattcgtcgtctgtacccggagaacaacgatgcgcgtaagcaggcaattaagcgtcaccttgagtttttcaacacccacccttacgttgccgctccggtactgggcgtaacgctggcgatggaagagcagcgcgccaatggcgcagagattgacgatggcgctatcaacggcatcaaagtcggtctgatgggaccgctggccggcgttggcgacccgatcttctggggtaccgtgcgtccggtgtttgcagccttaggcgccgggatcgcgatgagcggtagcctgctcggtcctctgctgttctttatcctgttcaacgcggtgcgtctgctgacccgttactacggcgtcgcctatggttatcgcaaaggcgtggatatcgttaaagatatgggcggcggcttcctgcagaaactgactgagggggcgtcaatcctcggcctgtttgtcatgggggcgctggttaacaagtggacgcatgtgaacattccgatggtggtgtcaaaaatcaccggctctgacggacaggttcacgtcaccacggtgcagactatccttgatcagctgatgccgggtctggtgccgctgctgttgaccttcgcctgtatgtggctgctgcgtaagaaagttaacccgctgtggatcatcgttggcttcttcgtcatcggtatcgccggctacgcggtcggcctgctgggtctgtaacttccaggctgtacgccgggggcttgcccccggcttttttttatcaggagaaacgcaaagcaatgaccttcacggacctggtgatcatcctgtttatccttgcgctactggcctacgcgatatatgaccagtttattatgccgaggcgaaacggcccggtactgctggccatccccctgcttcgccgcagtcgcgttgacggcatgatctttgtcggcctcaccgccattctgatctataacaacatcacccagcacggcacggcgatcaccacctggctattatctgtgctggcgctgatggggctctatttattctggatccgtacgccgaaaatcatttttaaaccgcgcggctttttcttcgccaacgtgtggatagaatatcagcggattaaagagatgaatttatccgaggacggtgtgctggtgatgcaattagagcaacggcggctgctgatacgcgtacgaaatatcgacgatctggagaagatatacaaacttctcattacaactcaatgacttaaaaatatagccagcgctatattattcccgttagcagcggagaaatattatagccacggctatatttcccgcctaaccttatcttttttattaactattttttcacttataaattttaatgaaaatcgttatcatttggttattaaaatagccctcttctgttattgttttatattctaaaaatatgttaaggttgcgcccgtcgttggggagtagccgatttcctgcccgccaggaaatgtacgtgtcaacatactcgttgcaaaacgtggcacgtacgggttgaagagattcaatcaggcgagaccatagatacatcactgctgtacgtattgctcagccattgagcggctccgcgtatgtttactgggggcagcgatgtgtcatatggattatccccggtcaggacacgcacatgaatttatccgctaccattcttctcgctttcggcatgtccatggacgccttcgcagcctccatcggcaaaggcgccaccctgcataaacccaaattttcagaggcagtacgcaccgggctgatttttggcgccattgaaaccctgacaccgctggtcggctgggggcttggcatgctggccagccagtttatcctcgagtggaatcactggattgcctttattttactggtgtttctcggcgggcgaatgatcgtcgaaggttttcgcggcgacagcgacgaggcgtgcgaggcgcctcaccgacatggtttctggcttctggtcaccaccgccttcgccaccagccttgacgcgatggccgtcggcgtcggtctggccttcctgcaggtcagcattgtgaccaccgcgctggcgatcggctgcgccacctttatcatgtcgacgctggggatgatggtcggtcgctttatcggcccgctgcttggcaaacgagccgaaattctcggcggtatcgtgctgattggcatcggcagcgaaatcctctggagccatttcgccggttaagctttacgcttcgcgctgccagcagtggatcataaaatcggtctggcaaccaaaggtcggctgctgacgcagcgcggcgtgcacttcggctttagcccgccatgcgaacggcgtcatctgcagcagggcctgcgcttcacttcccgtcaggatcatcggataagccagctgctgctgagcctccaggcggaaccccggcatcgcttccgtcttcagctcatgcaggcgaacttcatcgtaaatcagccctttcagctccagtaggtgacggggacccggcgtggcggtgatcacccaaccaccgggacgcaccacccgcgccagctcttcggcgttgcagggcgcgtaaatgcgcactaccgcgtcgaagctagcgtcggaaaatggcaggcgctggctggaggccacgcaaaaattcacctgcgggtagcgttttgccgccgcgcggatcgccggcttcgacacgtccagcccccagctgcagctggcgatggcggcaaacgcgtgggtgtaatacccctcgccacagccgatatccagtaaatccgtaggggcgtaatgtcgcagccgctcagcgatagcatcccgtagcggctgataatgtccggcgtcgaggaacgcccgccgggcctgcatcatttcggcgctatcgccgggatcgcgcgaccgcttgaactgcaccggtagcagattgacgtacccctctttcgccagatcgaactggtgccgctgcgggcaggaatagtggttgtcgctacggctgagcggcgcgtgacaaagggggcaactgtatgacatgacggctccggtgttgctgaaagggcgaaagtgtagcgctattcgcccctgcagaccactgttacagcgccggcccctgtgggtggctatcgtgcattacgatcagattctccgccccttgcggcatgccgtccggcatgacgttctccagccgcaggacatcgcccatgatctggctgaagaccggcgcggacacagcgccgccgtaataggaaccattgctcggatcgttcatcaccaccaccagcgcgaactgtggtcgactggcgggcgccacgccggcggtataggccacatacttatcgatatatttgccgtccgggccgattttcttcgccgtgccggtttttaccgccacccggtagtcgcgtaccgccgctttggtaccgcccccgcccgggagcgccacgctctccatcatatgttccacgctatgcacaatactctccggcatcacccgcgtgcccatcaccggcggatcgatgcgggtaatcgacagtggtcgcgcaatgccgaagccgccgatggtggcgtagacgtgggcgagctggagcggggtgaccatcaaaccatagccgaaggcgaaggtggcgcgatccagttgcccccagtagcggcgatgcggcatcagcccggcgctttcgccggtcaaccccagccccgtcggttcgccaaagccgaaagctttataggtatcgatcagatgctgcaccggcatggcgagcgagagatgggacacgccggtatcgctggatttctgcaggatcccggtcaggctcagctccggataatagcccacatcgcgaatacgatggccatcgaggacgaacggatgggtatccaccacgctgtctggctggacaatcccctgctgtagcgcagtcatgatcaccagcggtttgaccgtcgacccgggctcgaaggtgtcgctgatggcccggttgcgaaaatcatccagcgtcgcgctatcgcgattgttcggattgaagtccggatagctggccatcgccaggatctcgccggtatcaattttgatcaataccgccgccccggactctgctttgttccagcggacggcgttgtcgagggcgtcttccgtcaccgtctgcaggcgttcatcaatactcagctgcagattatgcgccggaaccggcggcacttcggtaatgttctcaatgacattgccatgtttatctttacgcaccagacgtcgcccgggtttaccggtcaactgggcgttaaagcttttctccaccccttcgatgccctgattatcaacattggtaaagcccagcagattggcagccacgtggcccgccgggtagaaccgtcgcgattcatcgcgcaggtagacgcccggcagatgcagtttatcaatccactctgcctgctcgggattgatctgacgcgccagatagagaaagcgagcgtggggatgactctgtacccgctgggccagctctccgaggttgaggtgcagcgcttcggccatcgcctgccagcggggtccatagcccacaccgcccttctccatagtggtctgcgggtcgatccagatagcactgaccggaacgctcaccgccagcggccgtccttcccggtcgctgatcatcccccgctcaaccgctacgggttcttcgcgcagggagcgcatatcttcttgttttaccaggttatcgggggagataatttgtagccagcccacgcggaccagcagcagccccagacaaccgagaatggccacacacagtaacccgaagcgaatcggggtgaaactggcggcggacttcgtttttttctttagcaccatagctccggcattgttttgcaaccaactgatttaacagaaaattagcaaaacagactgctacacaatgctaataaagatgagtatttgcaacaagacgcgacgggagggggaaaaatgacatgctttgcaataaaaatgcaaaagccccgcgcaggcgaggcttttatacaagaagagtggtcttgtatcagatagcagttacgttaactgcagccggacctttctggccgtcctgaatttcgaactcaacgttctggccttcagccagagttttgaagccgttaccctggatagcggagaagtgtacgaacacgtctttgctgccatcagccggagtaatgaaaccaaaacctttagactcgttgaaccacttaacttgacctttaatctttgccatttgcaaaattccttagactgttttcttcgcctgctggcgtttacctagataaaactgacacataactgcatgaggcactaatttaaggttcggcagagaagcggtattcaacgacaacgtgtttactcaggacttctttactgaaaatgccacacataaacagaactgtacctcgtttaacccgaaacgtgttatcacacactacgtaaataatggcaagccatttttaaacgtgtctcgatcgttcgcacaaattataaggtaatcatttgatcgcctgcacatttatgcgtctttgccgcccctggcaaggcgctacagcatcagccaatatcgcccattcgctgcctcattactgcaacttttttaccatagctcaacaacttcgcttcgtccaggtatgtccgtacacgaactgctgtgatgtaagcgtctggtgggcaacggtgaatattgatgcgcataattcgttataactccagactaaaaatcgctaagccgtgccagtgtagtgataataaaacctgttagtcgtcacgctaaaaatagtgctaattctgcaccttaataatgaaaaaaagatgacagtgtcacgttacccaacaataaacgcggcgagaatgactttatttacagcgtgtaataaagaggatattgcactaagaaaggaataatggaataagaataagatattaccgtccgctatcatgcaggtgcgcatcttatgatgcacacctgtcgggcaccttaacgttcagctaccaggcggataaactcatcctcccctttcgccttgccggcgacggtcggctcagccacatcctctttctctggcgcattagcttcgcacaggcgacgtaacagcgcattctgccgcttttgctgatccagcagcgcttgcagcagctctatctgctcattggcccgcgaactggcgcggttgacgaagaaccataacaacagaccgacaagcagcagcgccacggacacagccagcgatgccagatttaaaatcccaggatttagtaactcactcatttcaccacctcaaagagaaggcgttcattctaccacccgcggcgcagaaggaaatcagtcggcagaaaaatgtcttaccacggaataaatttattaatagtgcaaatgccgctgaaaaactgaacatcctggtcgcacattacgttaagcatctgagtccacagcaacaggcagcctgctatgatgactatcagtaaaacccaccgtaattttttcactccactctccgcatcagtacgcaatgtcgccaggatagcacggccttcttaaaccgcggctaactgtattacgaaaggtaagtttaggaatcatcgacttgtttcaaaacgtgttcgtgtcaaaatcaagccagggatcatacaaataatgaggcatcaatgcgattaatcattcgtactattatcttggtggctatcttatggattggcgtattattgagcggttatggggtgttattccacagtgaggaaaacgtcggcggtctgggtcttaagtgccaatacctcaccgcccgcggagtcagcaccgcactttatgttcattccgacagcggagtgatcggcgtcagcagttgccctctgctgcgtaaaagcacaaccgtggttgataacggctaacatcgaaccggcgatcgcgacgtagcgccgcggtcgccaacccggtatccgccgcctcagaacggatagtcgttgtatcccatttgttcagaaatcttacgcgccgcctggtggagcatcgccacgtattcatgcaagcgttcttcagagaaacgtagcgttgggaatgagatgctcagcccggcgatgaccacgccgaaacggtcaaacaccggcacgccaatgcagcgcagcccctcttcctgttcctcattatcctcgccatagccctgctcgcgaacgccatccagcactttcagcaactcctcggtgctggtaatggtccgctcggtgctgcgcttatactccacgccgtcgaggatctgctccacttcgctgcgatcgcgccatgccagcagcaccttgccaatcgcggtactgtacagcgggttgcggcggccaatacgcgagtacatccgcaggttatacatcgagtcaattttatggatgtagacgatactgtcttcatccagcgccccaagatggatggtctctttcgtcagtcgcgaaagttcgcgcatctgaatatcggcgctgcgcaccaggtcgacgttctgcagcgcgcgcgcgcccagttcgaacagcttgagggtgagagagtatttctcagactctccttcctgtgccacatagcccagtgatttcatggtctgtaaaaagcgataaacggtgcttttcgacatcatgacgcgctgggacagttcggtaatgccaatttcacgctcttcacccagcgcctgtaggatgccgaaaaccttcaataccgaagagacagaatctggctgtttatccaaatctgcacctgccatttatcacctcgtcgtaactgttttataaaaattagaaccggtttttattataaattcgccgcctctgagccgcaatcattcttctgccacttcgttacaaatctgcgacatactgcgaattaatcaatgctaaactcatcattcaaaaaaccgtttcatttaagactcatattcaccatggataaaaattcttctgatggcgtgccgttgccgcaacgctatggcgccattctgaccatcgtgcttgggctgaccatggccgtgctcgacggggctatcgccaacgtcgcgctgccgactatcgccagcgatctcaacgcctcaccggcggcttcaatctggatcgttaacgcctaccaaatcgccattgtcatcgccctgctgccgctctccttcctcggcgacatggtcggctatcggcgtatctataagataggcctggtggtgtttacctttacctcgctggcctgcgcgctgtcgcgtagcctcgaaatgctaaccttcgctcgcgtcgcgcagggattgggcggcgccgcgctgatgagcgtcaacaccgcgctgatccgtctgatttatccgcagcgctttcttggtcgcggcatgggcattaactcctttgtcgttgccgtctcttcggcggccggcccgactatcgccgcagcgatcctctccctcgcctcatggcaatggctgtttttaattaacgtgcctctcggcatcgtcgcttttgttctggccatgcgctttctgccgaccaacagcgcgcgcagcaaaatcatccgcttcgatctgccgagcgccattatgaacgcccttaccttcgggctgctgatcaccgccctgagcggtttcgcccaggggcagtccactcagctggtgctggcggaggtcgccgctatgctggtggtggggttcttcttcgttcgccgccagctcacgatgcccgtccccctgctgccggtcgacctgctgcgtatcccactcttctctctctctatctgcacttccatctgctccttctgcgcgcagatgctggcgatggtctctctgcccttttttctgcagtcgatgatggggcgcagcgaagtggagacgggtctactgctaacgccgtggccgttagcgaccatggtgatggcgccgctggccggctatttgatcgagaaatgtcatgccgggctgctgggggctatcggtttgctgattatggcctgcggcctgttcggcctggcgctgctgccctcgtcgccctccgatctggatatcatctggcgcatggcgctgtgcggcgccggcttcgggctgtttcagtcgccgaacaaccataccatcgtcgcctcggctccgagccatcgtagcggcggcgccagcggcatgctgggcaccgctcgcctgctcggacagagcaccggcgcggcgctggtggcgctgctattcaatttgctcggtaacaacggcacccacaccgccctgctgctggccggcaccctggctatcgtcgccgcgctaattagcggtctgcgggtcactcagccgcgcgcagcctgacggacggtaaaaaaaatccgcagcttgcgggctgcggattttcgttttcagcgtcagaagatagattatttcagatattcaccgctacgcagggcttcaatacgcttatccagcggcgggtgagtcataaacagttcgctcatggatttcgctttaccgttaatgcagaacgccatcatgctgctggcttcctgcggctcatagctggttttcagacgctgcagggctgcaatcatcttctcgcggcctaccagacgcgccgagccggcgtcagcatggaactcacggtaacgcgagaaccacatggtgattatgctggccagaataccgaacaccagctcaagcaccgtggcgacggcgaagtagatcagcgggttgccattgctgctctccccttcatcttcccggttgccgccgaggaaaccggccgcaatctgcgcgataacgcgggagataaagataacgaaggtgttcaccaccccctggatcagggtcatggtaaccatatcgccattggcgatgtggctgatttcatgggcaatgaccgcttccgcttcatcacggctcatgttttgcaacagcccggtgctgacggcgaccagcgaggcgtcacgacgcgcgccggtggcgaaggcgttaatgtcaggcgcgtgatagatagctacctgcggcatggcaatacctacctgctgcgcctgctgcgcaacggtattcatcagccagcgttccgtttcgttgcgcggctgctcgatcacttccccacccactgacttcagcgccatccacttcgacatcatcagcgaaacgatagaaccaccgaagccgaacagcagggccataatcagaagaccggtcatgctgctggattggatccccgtgaggcttaacaccagcccgaacacgaccatcactgccaggttcgtcagcaggaaaagcgcgattcgcatcataattttctttttacctcaatttaacaaaacgcactatgcgattacccacatcgtatgggtcaggctgcaattttcaaccatcagcccccgctaagtcacgataaaaacacaactttacattttgtagcatcttgctgacagcggcagcgcaggttgacattttgttagataagctgaatggcgatgacaacgcgcacaaaaaaacgggcacctctcagggtgcccgttagcaacttatttgctggccggcggttccaccgccgggcgcgctttttccagatgcgccaggtctaccgcgatatggaccgtttcatcaagatacggatccggctcctggtaatccttcggcagatcgtccagttttttcagcggcggcttgccttcgcgtttcaggcgatcgttaatccgcgccagacgaatcgcatcatcttcttcgttctctttctcacgctgggcgtagttcagagagacgatgttacgtttgtccttcatcgcgttataacgggcaatatccttcatgatgtactggaattcaggatcctgcgcaatacgctcgtcgtggcgcttgagcagctccggtccaaacggggtcagatccccggacttcacataggtggccgcgttgatgctatcccacggcagcgcgttgtcttcatactgctcgccggtttcgcgatcttcattgccggttggcatcatgatatccggcgtcacgcctttgcgctgcgtactgccgccgttaatacgatagaacttctggatggtgtactggacggaacccaacgccggccactccggacgcagcatttgatcgtaaatacgattcaacgagcgatactgctgtaccgtccctttaccgaaggtcggttcgccaacgatcagcgcgcggccatagtcctgcatcgctgcggcgaagatctcagacgccgaggcgctaaagcggtcaaccagcaccaccagcggccctttgtaataaaccacgccatcgttgtcgctgtcttcgcgcactttgccattattatcccgcacctgcaccaccggaccggacggaataaacagacccgaaagcgataccgcctctgtcagcgctccgccgccgttgctgcgcaggtcaatgatgatgctgctgacgttctgtttttccagcttctgcagctgcactttcacgtcatcggtcaggccaacgtaaaagcctggaatatccagcacgccgactttttctttcccgacggttttcaccgacatcttcaccgcacggtcttccagacgaatgcgctcgcgggtcagcgttacaatacgcgtcttggctcctttaccggccggcaggatttcaagacgaaccttgctgcccttcggccctttaatcagcgccacgacgtcatccagacgccagccgatgacatcaaccatcgacttcccggtctggccaacgccaacgatgcgatcgccgacgctgatcgctttgcttttcgcggctggaccgcccgccaccagcgaattaatgacggtatagtcatcatccatctgcagcacggcgccgatcccctcgagtgagaggctcatttcggtattgaactgctcggtattacgcggcgacagataatttgtgtgcggatcgatttcgcgagcgaaggcggtcatcgccagcgagaagacatcttcgctgttggtttgcgccaggcgacggatagcaaacttatagcgacgggttaaggtgtcgcggatctctttatcgtctttacccgccagcttcaggcttaactggtcaaacttaaccttagcgtcccacagcttgttcagctcggcctcgtcttttggccacggcgctttggagcggtcaaggttgaaattatcattgccggtaaagtccatcggacgttcaagcaccttcagcgcatactgatagcgctcgaagcggcgctgctgccccaggttgtagaggtcgtaaaagacgtccagtttcccgctgcgcagctcatcgccaatttggtcttttttagccgcgaacttcgccacatcgctggccagcagcacattgtggctgtagtccagcaggttcaggtaacggtcaaaaatctttgccgagaaggcgttgtcgagatcaaactgacggtaatgagagcgggtaaagcgcgacgtcacgcgctcgcttaccgtcgcgtgctgcggctcttctttcagcacggggatttgatctgcgcgggttatgtcatcaacagcgaatgcatggcctgctattgccagcaggcccgcaagcgcggtgattttaaaaaatgtgttcatgcctggcccggcctccgtttcagaacaccaggtgttctgcgcgtacaatcattgacataccagaagtcagctgtacacgaacgccatctttggtgatttccagaacggtggcgtccatggcgttattgcctgcttttaccttcagcgcctggccgacggtcagaacggaaacatccgataccggagtaagacgctcttcacgcggggctttggccgcaacaggacgcggtttacgctgttcagcgccttctttacgacgcggctgctgaggacgcggtttacgctcgcggcgaacgccttcatcctgctggcctgcggccgcagcggcttcgcgttttttcgcctgctgggctgcgcgctgcgcctgaacgcgagctttcgcttcttccagctgctgacgcgcatgggcaatgtgctgctcttccagttcgccgcacggattgccatccaggtcaacgcgaatagcgccggcttttacgccgtacagataacgccagctggacgtgtagagacgtaatgcagcgcgaagctgggtcttgctgagattcatctcaccacccactcgctcaacgagatcctgaaaaattccgattttcagggggcgcgcttcaccttcagcgctaaagcactgcgggaaacgttcggccagaaaggcgataacttctttactgctattcaacttaggttgattttccatgaaatttcctgattacaacggacgtagccaacaagccgcaggcatgaacaggcgacattataatgacgtcctcgctaaatgctacgttatccgttgattatcccacgacacgggtaaagattttttgataatccgtggccgcaatgagtttttccagatgctcgaccagcgtgcgcaacccctgctcatcttcagcggtgaagcgcccgtaagccggactatcgatatccagcacgccgataatctggccattcacgcgcagagggaagacaatttccgaattactggcggcatcgcaggcaatgtggccgtcaaaggcgtggacgtcctcgacgcgctggacctgagcctgcgccaccgccgcgccgcatacgcctcgcccgaccgggatccgcacgcaggccagtttgccctggaacggtcccaacaccagggtatcgccttccagaaggtagaaaccggcccagttgacctcgctcagccgctcgaacagcagcgcgctggtattggcgatcatcgccagaaaactggtttcacctgccattaatgcctggaaatcgcggttcagatccgcgtaaaattctgttttgctcattatatcttcactttgttgtcttactgcctgatacgtacagcctactaaaataagcattaaatgcgcttgggctcaagatgaattcattcataggttaagatagtgagatacattcattcctgtacgtaataaatgccgataaaaacacccaccctcaaacctgcgaaaaagatggtcgtgcataccgtcagcacgccgcttccctatgcgcattatcagcgctgtacgcagtgtgacatgctcttccgcttaccggtgctcaaacgcaaccaaagcgcctggtgtccgcgctgtaacgcgaaggtgcgcgatggccgcgactggtcgctgacccgcctgggcagcatggccctcgcgatgctattgctcatgcctttcgcctggtctgaacctctgctgcgcctgcatctgttgggcgtacgcatcgacgccaacgtcctgcaggggatctggcagatgaccgcgcagggcgatccgattaccgccgccatggtactattttgcgcggtggtcgccccggtgctgctggtggtctccatcagctatctctggctgggcaatgtgctggggatgaacctgcggccggtgctgctgatgctcggcaagcttaaagagtgggtgatgctggatatctatctggtgggcatcggcgtcgcctccatcaaggtgcaggattacgccttcctgcagccgggcatcggtctggtggcgtttatctccctgacgttgttgagcatcctgacgcttattcatatgaacgtcgaagagctatgggagcgtttctatcccgagcgtccggcgacccgcgccgataataatctgcaggtgtgcaccggctgccattacaccggctatcgcgacgcgcgcggccgctgccgacgctgccacacgccgctgcatcatcgccgaccgcagagcctgcagcgcagctgggcggcgctgattgcctcgctggttttcctctttccggccaacctgttgccaatctccatcatctacgtcaacggcgcgcgccaggacgacacgatcctctcggggatcatctccctggccagcagcaatatcgccattgccggggtcgtgtttatcgccagtattttggtgccattcaccaaagttatagtgttatttaccctgctgctcagcatacaattcaagtgcgagcagggattgcgcacccgcatcctgctgctgcggctaatcacctggattggccgttggtcgatgctggatctgtttgttatctcactcaccatgtcgctaataaatcgcgatcagctcctcgccttcaccatggggccggctgcggtttactttggcggcgcggtaattttaactattcttgcagttgaatggctggacagccgcttactttgggacgcacatgagtcaggaaacgcccgcttcgcagactgaagccagaataaaaaccaaacgccgtatttcgccattctggctgctgccggtcatcgcgttgctgattgccgcctggctaatctggaccagctttgacgatcgcggatcgacgattacgattgatttccagtccgcgaacggcatcgtgccgggacggacgccgatccgctatcagggggttgaagtcggcaccgtccaggatattagcctcagtaaagatctgagtaagattgaggtttcggccagcatcaaacgcgatatgaaagatgcgctgcgcaaagagacccagttctggctggtcacgccgaaagcctctctggccggcgtatcgggcctcgatgcgctggtgggcgggaactacatcggcatgatgccgggcaagggtgaacccgaagatcactttgtcgccctcgacacccaacctaaataccgcatcaacaacggcgagctaatgatccacctgcaggcgccggatcttggctctctgaacagcggctcgctggtctacttccgaaaaatcccggtcgggcgagtgtatgattattccctgaatgccaataatcagggggtgaccatcgatgtgctaatcgagcgccggtttaccaatctggtgaaaaaaggcagccgcttctggaacgtctcaggcgtcaaggccgacgtcggcctgagcggggccaaagtgcaactggagaacctgtccgcgctggtgaacggcgccatcgcctttgactcccccgccgattcgcatgtcgcctcgcaaaacgatgaatatcacctgtatgaagatctggcgcatagccagcgcggcgtggtagtgaccctcgatctgcctgatggcgacggactgaaagcgggctcgacgccgctcatgtatcaggggctggaggtgggccagttaagcaaactgaatctaaaccccggcggcaaagttactggcgagatgaccgtcgacccgagcgtggtgacgctgctgcgggagaaaacgctgattcagatgaagaagccgaagctctccctcgataaccccagcattagcaccctgctcaccggcaatacctttgagctggtgcccggcgaaggcgagccacgcaatcacttctcggtaatgccggcggataaagcgctgctggatgagcccaacgtcgccaccgttaccctctcggcgccggagagctacggcatcgacggcggtcagccgctggtgctgcacggagtaaaagtcggccaggtgctggagcgtaaactgacggccaaaggggtaacctttcaggttgccattgaccctgaataccgcgatctaattcacggcgacagcaaatttgtggttaacagtcgtctggacgtcaaagtggggctcgacggcgtgcaggtgctgggcgccagcgccagcgaatgggtgaacggcgggatcagggtgatccccggcgaaaaaggcaaaatgcaaagcagctatccgctgtacgctaaccttgaaaaggcgcaggaaaatagcctgagcgaagtgccgaccactaccctgagcctgtctgctgagacgctgcctgacgttcaggccggctcggtggtgctgtatcgtaaattcgccgtcggcgagatcatcgccgtcaaaccgcgcaaggatgcattcgatatcgatctgcatatcaagccggagtaccgctacctgctgaccaacaacagcgtcttctgggcggaaggcggtgcgaaggtcaagcttgacggtaacggactcaccgtgcaggcctcgccgctggcgcgcgcgatcaaaggggcgatcagtttcgataacctcaatggcagcagcgccggagcacggctgaataacaaacgtatcctttatgcatctgaaacggcggcgcgcgccgtgggcggccaaatcaccctgcacgcgtacgacgccgggaagatggcggccgggatgccgattcgttatctcggcatcgacatcggtcaaatccagtcgctggagctaatcaccgccaaaaacgaagtgcaggcgaaagcggtgctctatccggaatacgtcggcaccttcgcccgcgccgggacccgcttctcggtgatcaccccgcaaatctccgccgcgggcgtggaacatctcgacaccctgttccaggcctacatcaacgttgagcccggccgcggcccggcacgacgcgattttgagatccaggatacgacgatcagcgattcgcgttatatcgacggcctgaacatcgtggtggaagcgccggaggcggggtcgcttggcatcggtacgccggtcctgttccgcggactggaagtcgggacggttaccggactgtcgctggggtcgatgtctgaccgggtgatggttaagctgcgcatcagtaagcgctaccagtacctggtacgtaataactcggtgttctggctggcctcgggttacagcctcgacttcggcctgattggcggggtggtgaaaaccggtaccttcaatcagtttatccgcggcgggatcgcctttgccacgccgccgggcacgccgctggcgccgaaggcccaggatggcaagcacttcctgctacaggagagcgagccgaaagagtggcgggagtggggcaccgctctgccgcagtaatgcccccttctcccgccccgggcaacgccgggcgcggggagaggataaaccgcacgccccggtgtcacgcgccggggcgtttgtgctaaactgcgcaccctttttttctgtggtgcgctgcccgtggctgaaaatactgtctatttccctgaagcgtttctcgctcaaatgcgcgcggcgatgccagcgcatctctctttcgacgactttatcgccgcctgtcagcgcccgctacgccgcagtattcgcgtcaatacgctgaagattagcgtcgatgatttcctctctctggttgccccctacggctggcagctcgcgccggtgccctggtgcgcagagggattctggatcgagcgagaggatgacgacgcgctgccgctgggcagtaccgccgaacatctcagcgggctgttctatattcaggaagccagttcgatgctgccggtcgccgccctgttcgccgataaccggcagcccgaacgggtgatggacgttgccgccgccccgggatcgaaaaccacccaaattgcagcccgaatgggcaacgcgggcggcattctcgccaatgaattctccgccagccgggtgaaggtgctgcatgccaacatcagccgctgcggcatcagcaacgtcgctctgacccacttcgacggccgggtttttggcgcggccttgcccgaaaccttcgatgccatcctgcttgacgccccctgctccggcgaaggggttgtacgtaaagacgccgacgcgctgaaaaactggtcgccggagagcaacctcgacatcgccgccactcagcgcgagcttatcgacagcgccttccatgctctgcgccctggcgggacgctggtgtattccacctgcaccctgaatcgtgaagaaaatcaatcggtcattgagtggctgctgtcccgctatccgcaggcggtggagatcctgccgctgggagagttgtttcccggcgcagccgacgccttaaccgcggaaggttttctgcacgtttttccgcaaatttacgattgcgaaggcttctttgtcgcaaggttgcgcaaaactgcggcgatcgatccgctcccggcgccaggctataaggtcggtaaattcccgtttacgccgctgaaggaccgggaggccgccgcggtaactgccgccgccagggctgttggcctggagtgggacgcaggccatacgctgtggcagcgggataaagagctgtggctgtttccgctggctttggagcccctgttcggcaaggtgcgcttttctcgcatcggcgtgcgcctggcggagctgcacaataaggggtaccgctggcagcatgaggcggttatcgcctttgccgcgccgcagcgggccttcgagctgtcgcaggaggaagcggaggaatggtatcgcgggcgcgacgtctatccgcaaaccgcgcctgggcaggatgaaaccattgtgaccttccagggcgtcccgctgggcctggcgaagcgcgtcggctcccgactgaagaacagctatccgcgcgaactggtgcgcgatggaaaactttttgccggcaaggtgtgaggccgcgcaaaaaatgcgcactttttgactggcgcttttcgccccattgactacgctgaaaaataacggccataactggtcgtaccacaactcagctgaaaaatggggtgaagcgatgagtaaaaccaatgtccgcatcggcgcgttcgaaatagacgatgccgaactgcacggtgagcatcagggtgagcgaacgttaagcataccctgcaaatccgatccagacttatgtatgcagcttgacgcctgggatgccgacaccagcgtgcccgcgattctcaatggcgaacattccgttctctaccgtaaacattacgaccgccagtccgatgcctgggtcatgcgccttgcctgacaccaatgaacccgtcgcctgagacgggttatttatttccccgtcccgccgtcatcccctacactaaatagtatgtgaacccgagcatgaggccaggatgtttgccttagtgttgtttatttgctatctggatggcggctgcgaggacattgtggttgacgtctaccgcgaggaaacgcagtgcttagtggcgatggaggatcagcggatccgccacggtggctgctacccgatagaagattttattgatggcttctggcaacccgccagcgaatacagcgacttttagcctgccgactgcagcgccaccagcgtcagcatcccaccaaacacagcgcccgtatcaatatagtgttgattatcgtggtcataacgcgcctgaagcggcgtatggccaaaccagaaatggtctgcgccgccaatagcgccatggcgccccgccaggtgttcactcagacgatggcggctccatagtacccgttggggatccaccggctgctgccagcgatagaccggcgccgggtaatcggcgtgggcgatcacatgccgcgctttcccgcattccacttcaataatcaacggtagccgccgacagtgcgccagcagccgatcgacgtcggcccgctgccgcgcatcgcccttgacgtaccagtcgccaccgttcatctgccagagccgcatatctccgctctccagcgcctccagcgccatctgctcatgattcccccgaacggtcctgaaccagcgacagcgcaacaggccaagacaatcggcgctctgcggcccgcgatcgatcagatcgcccaccgagatcagcagatcggcccagggatcaaagcgcaactgacgcaggcgattcatcagcagcgcaaagcagccatgcagatcgcccatcagccagatattacgccagtcgctgccgttaatacgttgatacatataattacctctcagcggtaattataggtaattccagcaaaggtccacggaatttaatttacacctcaatcaattttaaacagacggcaaatatagtccgccagaggattaagcttgtcagtggctcgctttaaaatagggggaaatcacaacgaggtgtttatcgtgacagacaatagcctgcattcatccggcgtgctagcgccgcgctcgcatcttattgccgatctggtgatgggcagattgacacctgcccccatctggcggcaaaaaaattaccgctttaagtttttgctgcgcacggccctattttataacgccaccagagcgatgctggaagcgctcagcgctcgggatgattttaatcagctgctggccgcgcaggctacgctgccgggcaaagtacaccgtcaatatctgacccgcgatctcaacgcctggcagcgggcggtggcggtaatcaaccattatcgctatatcgacaccctacgcggatcgcggctggcgcacgctatgaccgcggtgtctgaggtcccgctgctgacgttaaacggaaaagaggaccgccggtttactctttatgcctcctcggcaggcaaagccgaacgtgagggtgaaaccactctgtggctgcgcgacagcgaccacaccctgctggccagcgccaccttcagcgtaacccgtgatcacgatgcctggcagctggttatcggcggtctgcaggggccacgacgtcacgtttctcatgaggtgattaagcaggcgactcgcgcctgctacggcctgtttccgaagcgcctgctgctggagtttatctggcagctggccgctcgcagccaaatcgcggctatttacggcgtcagcgataacggtcacgtgttccgcgccctgcgctatcgcctgagcaaaggccgccatttccacgccagctacgacgagttctggcagtctatcgacggccagccggaaagcccatggcgctggcggctaccgctatgtctggaaagaaaatcgctggagagtatcgccagtaaaaaacgggctgaatatcggcggcgattccagctgctggatcagctgacggagcaggtggcaatattgacgcagcggcatgccggtgactaaattgcactgtcggtgaagccgaattacaacatggcgtttgcttattatgtcaatatttcgctactatcagggtccccgaaggccaccggatagtcgcttgcataatgagtaaaaccgaaatttttctgctgattattctggcggtcattctgctcgggagcatatggtttattttcagcgatgaaatttggctattgctctgctatctggaaagccagatataccctacattcagcgttccgcaataatattttccgcccgcaaaagtgctcgtcttattatttatgccacctcgtcagccggcgaggtgtaatcgcatgaattgccaaatcgtttagattttgcttattttatttatcatacaaatatgtatactagcaggcttccgatgttggcccgccagttaacctgcacgccgggcctgtttaggtgcaggttttttcttttctccgccctcgtttacggttccacctttgccacctccccttccacaggatgcgatttatgtgtaaatgaattgtgtatgctaaaaacggtgtgctataacgggacatccagaggccagcgggtgtttgactgacaggatgtcgctggctcttgagaaagaagacagataaagataaaaagagaccgaatacgattcctgtattcggtccagggaaatggctcttgggagagagccgtgcgctaaaagttggcattaatgcaggctaagtcgccttgcactataagaatagtttaacgcgtcagcttttccagtccgcggccaaagtggctgcataattcctggaaagggggcctctgccagcgaaaaaaccgccactgccgttgtccggcaagggcggtttttttgatgttattacagcaggatagcgagaaagtttagcagagcttctgcgctcgctcgataaagggcgcgaggctcattttttgtcccggatgctgcggatcgtcgatctggatcactgagatcggctgcgcggtggttttgccggctttgacctgctgctcagccacctcattgagcggatactgaaccagcgtgctcgggttgatggcgtaaagcgcgttacccggtcgacaggtcaacataacctcttcccggttgaacgcccagctctccttccccacctcaaaacggctcacggtgataatttgtggcgctgccagagcagccccggagcttgccagtaacaacatggtcagaacaatttttttcatgattttgccagttaattcaataaggttcccaggtggcaaacagactgacggccagcagcgccagcgcgcccagccctatttcagcctgcgtggttcgcaggatcaggctttccgcctgcgaaccgcttgccgacatgcgcggtaccagaacatacctgttcactaacgcaattaccaccatcccggcgaccagcgcacatttgatcaacaacatgcgtccccacggcgatgcgccaatcaatcctccctggatcaacagcgcattgagcgctccgctggcaatcgtgccggcgacggccagatgcccgtaacgtgaaaagcgcgccatggtatagaccgcggccggccgccagcgcccctgcgccaggcgcaggcaatagataaagggcaacagaccgccgaaccagctggcgacgcagaagagatgcacagcgtggtttgtccgctgcagcacgccggtgagaccatcgtgcatagcggcgtgccctaccccggcggaaagcagcagctgtgccgccagcagggccaccagctggcgggcgccgtgacggggacggatccacactaccgcaagcgcgatccacgccagtaggatctgccagatccacactccaccaaagcgggtcccggccaccgcctgccagacggcgggtcgccagacatccgtccagccttcgcccatcattcctccctgcaggagatacagcgccagcgtagagatcgcgccgatcagcagcagcgggcgcagtagtggataaaagcgcagcatcagcacgcgtctcagcggtaccggcgcccaccaggcgccatacagcacgcagccaaaagccagcatcagggagataaagtgcccaaagcgcagggtaatatagagcccggtcagcatcgcttacttcacgctaaaggtatattgccctttggttttatgaccatccaccgagaccacatgccatgccacggtgtactctcccggcggcaaggcttccgccaaaggtaacgtgacctcggccggattatcggcgctgcgggtcagttttccggtagccaccgcatgctgctgcggaccggtgacggtcacgccgctgaatgcgggttcaataccttcggaaaaactgagcgtcagcgtctgtggggaagctgaaagttgcgccccggcggtcgggatctgctgctgcaggtgagcgtgggcaaaggcgcccgccgcggttaacatcccggcaagcgcaacggagaggcgcaacgcgcgtccagcaagaagtcgcatattcgtcattcccttttgttatgtctgtagcacagagaataaccctgtataatgccagagtcgagccaggcatctggccctgaccggatttataagcagagtggagtggatgatggaaagaaatctggccaaaatttcgcaagatgagatggataaagtcaatgtcgatctcgccgccgccggcgttgcttttaaggagcggtacaatatgccggtggtcgctgatttagtcgagcgtgaacagcctgcacatctgcgcgactggttccgtgaacgactgatcgcccatcggctggcctccgtctccctttcgcgactaccgtgggagccgaaacagaaataatgcgcgctcgcctcctccccgtcggttggcaagcccggccaattccattacgcttattgttttgctctggagcgagccatgctgcgcgtcattgataccgaaacctgcggcctgcaggggggcatcgttgaaatcgcctcggtcgatatagtcgacgggcaaattaccaatcccatgagccatctggtgcgtcccgatcggcccatcagcccgcaggcgatggctatccaccggatcacggaagagatggtcgccgataagccgtggattgaggagattattccgcactatcatggcagcccgtggtacgtcgcgcataacgccagcttcgatcgccgggtgttgccggagatgcacggcgagtggatctgtacgatgaagctggcccgacgcctgtggccgggaatcaaatacagcaatatggggttatataagtcacgtaagctgaacgtgactacgccgccgggactgcatcaccaccgggcgctgtatgactgctatatcaccgccgcgctgctgctggatatcatcaatgtttccggctggacccctgacgaaatggccgatatcaccggtcggccggcgctgctgactacttttaccttcggcaaataccggggtaaggccgtcgccgagattgctgaaaacgatccaggctatctgcgctggttattcaacaatctcgaccgcatgagccccgaactgcgcctgacgctcaggcattacctcggggaatagcgcctacactgccgcttttcccggcagtgtcccctgcgccagggcgatgaaaaaggcgtactccagcgccaccccttcatagcttttaaagcgcccggattttccgccgtgtccagaatccatatcggtgcagagcagcagcaggttatcgtcggtttttagttcccgcagtttcgccacccatttagccggctcccagtattgcacctgggaatcatgcagaccggtagtcaccagcatgtggggataggcctgcgccctcacgccgtcatagggactgtagcttttcatataatgataataggtttcatcctgcggatttccccactcttcaaattcaccggtggtcagcggaatagtttcatccagcatggtggtcaccacatcgacgaacggcacctgggctatcacgccatggaacagctctggccgttcattcacggccacgcccatcagcattccgccggcgctgccccccatgccgtagcaaagccgcggatcgccgtacccctgggcaagcagcgcgtcacagacgtccagatagtcgttgaaggtatttttcttacacaggaatttaccgtcttcataccattgctgacccagctcgccgccgccgcggacgtgggcgatggcgtagacaaagccgcggttgagcaggctcagccggctggcgctgaaatcggcatcgatactctcgccatatgagccatagccatagaccagcagcgggttgctccctttgcgaaaatgttcgcgatggtagaccagagagaccgggacttcgacgccatcgcgggcggtcacccacaggtgttcgctctggtagcagctcgtatccagcccctttacctcctgctgtttgatcactcttcgttcgccggtatccatatccagttcaaacagcgtatccggcgtagtcatggaggaatagccgtagcgcagtcgcgacgtttcgggctccggattataggcaagccaggtgacataggccggatcgtcaaaagcgatccccaccacctcccgggtcttgcggttaatttgccgcagactggtcaggccacgctggcgctcttccacaaccagccagtcggtaaacagggtaaatccttcgagcatcacgtcgtgacgcggcgggatcagcgtggtccactgttcttcatcacgcagcacggtacggtagaggccgaaattcttcccctcccggttggaacgaagatagaaagcgtgctgatagtgatcaagactgtattcatgatctttacgccgtggcagaaagcagaccggctcggcgtctggcagttcggcgttgagcagcagcacttcgctggtggtggcgctggagagataaattaccacgaactgctgggaggtggttttatgcacgctgacgtagaaggtctcatctttttcctcgtagaccagcgcgtcgctctgcgccggtgtcccgacggtgtggcgccagacctgataagggagcagcgtggtgggatgtttacgcacataccaaacaaagcgtgaatcgttgctccaggcaaagccggaggtgacattttcgaggatttccgggtaccactcgccgttgctgaggtcgcaaaagcgcaggccgtactggcggcgggaaaggtaatcttccgccaccgccattagctggttgttgggcgcaatgcccagtccgcccagggtgtagaactcgctcttcgccgcccgctggttggcatcgagcaggatctcccactcatcccactcttctttcagcaccgactgccgctggtagatagcgtattcgcagcccggctcatacacctgacggtagcgaaagccgtttttactgtagggggcagagacttcccgctgcggaatgcggtcgataatctccttcagcagacgctcctgcaggctgagctgcgaatccatcacttgcttgccgtaagcgttctccgcgtgcagatactccagcacgtcaggtcgcgcgcgctcatcgtcgcgcagccagtaataattatcgatgcgtgtatcgccatgcaaggtcatggcgtgagggatccgtttagctttaggtggcatgttattcttctgctgctttatcgtgacacaagagcattcaggccgcagggtggcgcctgaatgatgacgtgtctataagggtggcaaaagacgcgagcgatgcaagcgaaacgtgatgatttagacgcttagcgcttgtttttgtgactggatatcctgttctatatcggcccggacatctttcggcagcgccagggcgtctcccagcgcattaaggtagctacgctccataaaatggtcgatatcaatcaccgcgcagctgacgtagtagatctccagcgcctcctgcgggtcgatgatgccctcggcgagacgctgcggatccagcggctgggccagcgcctggtcaattagcacccgggcctgaacgtcaatattggccgcccgcagctgagtttcaatattcgcccgctcgtggtcatcaatatgaccgtcgcttttcgcggcaaataccagggccgtgatcagccgcacgctgcgcggatcgacatccgtcggcgccgctgccgtctcaggcgcctgggcggacgtattctgcgcgcgcattttctgctgatacttgttccataacaccgtgcccgccaccgccccgccgcctgccagcagcgcgctagtgccatatttcgccaacaatttgcgtgacgatttgctggccaccagcaatccggccagcccaccgatggcgccgggcagcaggccgctcccttttgacgactcgccggacggtgacgcaccctgctgcccgagcagcgactgcagttgatgtagccagttagccatggttttcctctcaggtgacaaacactgttatcagcctaaacgacgcgatgtcaggaaatgttagatatggctaaagatgcgcaaaggtacgtgcgacggcagcatcggagccgaccgaccagtgactgaccgccagcgttcaggctgccctggctttgcgcgctttggccgccggcacggcgtcatcacccgccggagaagtctcggcggtagccgacggcgcggaggcgtcctgtgcgggcgtctcttgctccggcagtcggccaactcgcaggatatgctgcagcgcttctttacgctccgccagccacatcgccatggtatcgcgctggacgtcatccatctccagcggcgatgccaccagccagtcattcagcacctctgccagatcgagcattttgtcgtaagcgtcggcctcttttttgctggcaaaagacattttttcctcaccttcgcggatcaccacatatttaatttcaaccgccatactgcagcctctcaacactgtatttttatacagtatagcaaatttccctcccggactcaactcacgcgcgttacgcgcgtaaagacatacgcaaacgttttcgtttataatcgctgccatctttttttactgcggatgagagttatgactgtattaggcaccgcgctgcgcccggcagccaccaaagttatgctgttaggttccggcgagttgggtaaagaagtcgctattgaatgtcagcgtctgggcattgaaaccatcgccgtagaccgctaccccgatgccccggcgatgcaggtcgcccaccgcgcccacgtcatcaatatgctgcacggcgagagcctgcgcgccctgattgaacaggaaaaacctgattatatcgtgccggagatcgaagctatcgctaccgacaccctggtcgaactggaacaggccgggcagaaagtggtccccacggcgcgggcggcaaagctcaccatgaaccgcgaaggcattcgccgcctggcggcggaagagctgcagcttcccacctcccgctatcgttttgccgacagcgaagaaggcttccgcgcggcggttaccgagatcggtttgccatgcatcgttaaaccggtgatgagctcctccggcaaaggccagagctttatccgctcggctgaccagctcagcgaagcctggcgctatgcgcagcagggcggccgcgctggcgccggacgggtgatcgtcgagggggtggtgaacttcgatttcgaaatcaccctgctcaccgtcagcgctgtcgatggcgtgcatttctgcgctccggttggccatcgtcaggaagacggcgattaccgcgagtcctggcagccgcagcagatgagcgacctggccctcgagcgtgcccaggccatcgcccgcgaggtggtgctggcgctgggaggttatggtctgtttggcgtggagctgttcgtatgcggcgacgaggtgatcttcagcgaagtctccccgcgaccacacgacaccgggatggtgacgcttatctcccaggatctctcggaattcgccctgcacgttcgcgccttcctcgggctacccgtcggcgctatccgccagtatggtccggccgcctccgcggtgatccttccgcagttgtccagccagaacgtcagctttggccagctgcagtcggccgtcggggctggcctgcagctgcgtctgttcggcaagccggagattgacggtacccgccgcctgggggtaaccctcgccgtcgccgattcggttgaggaggccgtggcgcgcgctaaagccgccgccgcggcggtcatcgtcgaagggtaaagacaaaaaacccggtcgcgttgccgcagaccgggttgttgacctggaggcgtggtttatttcgcgccttccaccgcttctcgcgcgagggtggtgatgcgatcgtagtcgccggcttcgagggcgtcggctggcaccagccaggaaccgccgatgcacagtacgctgttcagcgccaggtagtcacggtagttggccggagagataccgccggtcgggcagaaacgaatgtggccgaacggacccgcaatcgcctgcaaggctttcacgccgccgttggcttccgccgggaagaatttaaactctttcaggccatactgcatacccagcatcagctcagataccgtgctgatccccgggatcagcgggatggtgccgtcttcggtcgccgctttcagcagggattcggtcagacccgggctgatagcgaactgcgcgccggcttccgttaccgctttcaactgctcaacgttggtaaccgtgcccgcgccgacaatcgcgtccggaacttctttggcaatcgcgcggatcgcctccaaggcgcactcggtgcgcagggtaacttccagcacgcgaacgccgcccgccaccagcgctttcgccatcggtaccgcgtgttccagctttttcactacgataaccgggacaaccggaccggaggtgaggattgcttctgctgttgttttccagtttttcatcaggattttctctcgccagatctagaaattaaatcgtcttaaaaagtgatgcaggttgcgccctgctccgcgccagagagcttctcacgcagcgccccaaacatctcccgaccggttcccacgcgcgatgcgctgaggtcagggatatgcggctgacgcgccgccagttcggcctcatccaccagcagcgtcagttcccccgtctgtccgttcacgcgaataagatcgccatcgcgcactttcgccagcaagccgccatcatacgcttcaggcgtgacgtgaatggctgacgggactttaccggaggcgccagagagtcggccatcggtcaccagcgctattttgaaacggcggtccaataatacaccaagtggcggcataagtttatgtaattctggcatcccgttcgcttttggcccctgatgacggaccaccaccacgcagtctttgtccagcagccccgcttcaaaggccggcaacacgtcgtgctggctctcgaataccaccgccggcgcttcaatcacctggttctccaccgggaccgccgaagttttcattaccgcgcgtcccaggttgccgctcagcaccttggtgccgccgtggcgggagaatggtttttcaaaggtcgcgatgacctggtcgtccaatggcgctgtcgccccttcgcgccagtccagctcgccgttattcagccatggctccagggtgtagcgcgacaggccaaagccggccacggtgtgaacatcctcatgcagcaggccgcctttcagcagctcgcgcaccagtaccggaacgccgcctgccgcctggaagtggttgatatccgccgggccgttgggatagaggcgcgccagcagcggcaccacgtctgacaggtcggagaaatcgtcccagttaatgataattcccgccgcgcgggccatcgcaaccaggtgcatagtgtggttggtggagcccccggtcgccagcagcgccacgatgccgttgaccaccactttttcgtcaaacattttgcccagcggcatccactcattgccgttgccggtcatgcgggtgacctggcgcgcggcggcggcggtcagcgcttcccgcagcggagcatccggatggacaaaggacgagcccggcagctgcatgcccataaattcgaccaccatctggttggtgtttgccgttccgtagaaagtacaggtccccggcgcgtgataagaggcggcttcggactccaggagcgccatacggtcaactttcccttctgcatacagctggcgaatgcgaaccttctctttattcggcaggccgctggccatcggaccggagggaataaagaccgacggcagatggccaaatgagagcgccgccatggtcagaccgggaacaattttatcgcagaccccgagatacagggccccgtcgaacatgttatgcgacaggccgatggcggcggacatagcgatcacctcgcggctcaggagtgaaagctccatcccgtcctgcccctgcgttacgccgtcgcacatcgccggcacgccgccggcgacctggccgaccgcattggcgctgtgcagcgctttgcggatgatctccgggtagtgttcatagggctggtgagcggacaacatgtcgttgtaggaggtgatgatggcaatgttgttgcgcaacatgctcttcagggaggctttgtcgtcagcctggcaggccgcgaatccgtgagccagattgccgcaggccagttgcgcacgatgcacggtgtcggttttggcctggttaatccttgcgaggtaagccgcgcgggtgtcacgcgaccgttcgataatgcgatttgttacccgtaacattgtcgaattcataaaggctcctcaaatttttatctgtccggccgctgcgtgatgacgtgttgacgtggtaaaggccacaaacaccagcgctcaggggcaaaatgtctgcaggcagtgtaataaaaaaagccccgtgggtgaatcctcacggggcttaaaagattaaaaagcgtgcgactttctgcgtcagatcatgttaccggtaaaataaccctgacggattagcctccagccttactcgaactcgttccatgaacgaccgtcgcgagtgatcatggccaccgacgcaaccggtccccaggtcccggcctgatacggtttcggcgcatcgcggtcggctgcccaggcttcggtaatggagtcaacccatttccacgcctcttctacttcgtcgcggcgaacgaacagcgcctggatgccacgcatggtctccagcagcagacgttcataggcatcggccagatgcgtctggttgaaggtttcggagtagctcagatccagtttagtgatctgcaggttatgtttatgatcgaggcccggcactttgttcagtacctggatatctaccccttcgtccggctgcaggcgaatggtcagcttgttctgcggcagctcctgccaggtctctttaaacagattcagttccggggttttgaagtaaaccactacctctgagcatttggtcggcagacgtttgccggtgcgcagatagaacggtacgccagcccagcgccagttatcgatatcgacgcggatcgccacgaaggtttcggtgttgctggtcttgttggccccctcctcttcgagatagccaggcacttttttgccctgggcaaagccggcggtatactggccgcgaacggttttctcgcgcacgttggagcggtcaatacggcgcagggatttcagcaccttgaccttttcatcacggatgctgtcggcgctgagatcggacggcggtgacatggcaatcatgcacaggatctgcagcaggtggttctggatcatgtcgcgcatctgcccggcctggtcgaagtaaccccagcgcccttcaatacccacctcttccgcgacggtgatttcgacgtgatcgatggtgcggcagtcccagttattgacgaacagggagttggcgaagcgcagcgccagcaggttgaggaccgtctctttaccgagatagtggtcgatacggtagacctgacactcttcaaaaaactcgccgacctggtcgttgatttcacgggaggtttccagcgaggtgccgagcggtttttccatgaccacgcgcgcaggcttggcattaagcttcgcttcgcccagccctttacagatcgcgccaaaggtgctcggcggcatagcgaaatagttgatggtgacacggttcttttgatccagcatctcacccaggcgggtgaagccgctggtgtcattgacgtcaagattacagaactccaggcgtccgctcagggtatcccacaaaccttcatcaattttttccttcatgaaggtttccagcgcttcgcgcacgactttggtataagccgctttatcccagtcggcacggccgacgccaatgattctggtgtcagcgtggatctggcccgccttttcaagctgatacagggaaggcaacaatttacgccgcgccaggtcgcccttcgcgccgaaaatgaccaggtcgcatgcctgggccgtttgcgttaccgccatgtcattctcctcagttgatagtctggtgcttttgccaggctatatttgtaattttcttacactgcactgtactgtgtttacgtatttcccgaaagccttccccttcgtttgcggcggtaaaaccgcacagggtgaaaacattcggcgatgatttgggcattcggccgttattgttcgttgtttgtacctggttcaggtcagtaaaatacgaccctgatcatgtaatgaaaaaaaacaacatcatttcacgtcattcctcaccgcttgcgcttgcggaggggtatattcttgctaaaacgcccaatgatttcacccattaatgaaatcgtttccattgatgagcgccctgttactaatgaacatgctggaaaaaatccagtcccgactggaacaccttagcaaatctgaacgcaaagtggcggaagtgatcctcgccacccccgagcaggccattcattcgagcatcgccgccctcgcccttgaggccggcgttagcgaaccgaccgtcaatcgcttctgccgtagtctcgaaacccgcggattccctgacttcaaactgcatctggcccagagccttgcgcacggcacgctctatgttaaccggaatgtcgatgaagacgacagcgttgagtcatacacgggaaaaatattcgaatcggccatggcgagtttagatcaggtgcaccattctctcgacatgtcggcggtaaatcgcgcggtggatctgctgactcaggccaaaaaaatcgcctttttcggcctcggctcctcagcggcggtcgctcacgacgcgatgaacaaatttttccgctttaacgtgccggtcatctattccgacgacattgtcctgcaacggatgagctgtatgaattgcgatgacgatgatgtggtggtgattatctcgcataccggaagaaccaagagcctggtggagctggcgcagctggctcgtgaaaacgatgccatggtgatcgcgctcacctccgccggtacgccgctagccagggaagccacgctcgccattacccttgatgtgccggaagataccgacatctatatgccgatggtctcccgtttggcccagttgaccgtcattgacgtgttggcgactggctttaccttgcgtcggggggcaaaattcagagataacttgaagagggtcaaggaagcgctgaaggaatcgcgttttgataaagaaccattcgtacccagtgataatcaataaaagttgataacaagcagtaccccattacaccttcgataacgatccggctgtgcgacgttgcaggctggcgctaccgaatccatgttcacgcaacaccaaagttgtatcagtcaacggagtattacatgtccagaaggcttcgcagaaccaaaatcgttactaccttaggcccggcaactgaccgcgataacaacctggaaaaggttatcgccgcgggcgcaaacgtagtacgtatgaacttctctcacggcaccccggaagatcatcagctccgtgccgacaaagtgcgtgagattgcggcaaaactgggccgtcatgtggccatcctcggcgacctccagggaccaaaaattcgcgtatcgaccttcaaagaaggcaaaattttcctcaacgtcggcgataaattcctgctcgacgcaaaccttggcaaaggcgaaggcgacaaagagaaagtcgggatcgactataaaggcctgccggcggacgtcgtgccgggcgatatcttattgctcgacgatggtcgcgtgcagctgaaagtcctcgaagttcaggggatgaaagtgttcactgaagtgaccgtcggcggcccgttgtccaacaacaaagggatcaacaagctgggcggcggcctgtctgccgaagcgctgaccgacaaagataaagctgatatcgtcaccgccgcaaaaatcggcgtcgactacctggccgtctctttcccgcgctgcggcgaagacctgaactacgcccgtcgcctggcgcgcgatgccggctgcgatgcgaaaatcgtcgccaaagttgagcgtgccgaagcggtttgcgatcaggatgcgatggacgacgtgatcctcgcctccgatgtggtaatggttgcccgtggcgacctcggcgtcgagatcggcgatcctgagctggtgggcatccagaaagcgctgatccgtcgtgcccgtcagctgaaccgttccgtcattaccgccacccagatgatggagtcgatgatcaccaacccgatgccgactcgcgcggaagtgatggacgtggccaacgccgtgctggatggtaccgatgcggtgatgctctccgcggagaccgctgccggtcagtatccttcggaaaccgtggccgcgatggcgcgcgtgtgtctgggcgcggaaaaaatccctagcctcaacgtctccaaacaccgtctggacgtccagttcgacaacgtggaagaagcgattgccatgtcggcgatgtatgccgccaaccacctgaaaggcattaccgccatcatcaccatgaccgaatcgggccgtaccgcgctgatgacttcgcgcattagctccggtctgccgattttcgccctctcccgccacgagcgcaccctgaacctgaccgccctctaccgcggggtgacgccggtgttcttcgacagccagaatgacggggtggccgccgcgcacgacgccgtcaatctgctgcgggacaaaggctatctggtctccggcgacctcgtggtcgtgacccagggtgacgtgatgagcaccatcggcagcaccaacaccacccgtatcctcaccgtcgagtaagcacggtagagataaaaaagcctcctgacggaggctttttttatttctttttcgggaacagctctttgcgtttatagggctcgatttcacccggcttgcgcgttttcagcagcttcaggatccaggtatactgctcggtgtgcggcttaacaaacacttccacttcttcgttcatccgccgggcgatggtcgtatcgtcagcgtccagcagatcgtccatcggcgggcgcaccagcaccgtcaggcggtgcgtcttgctatcgtagaccgggaacagcggtacgacgcgggcgcggcacactttcattaagcggccaatcgccggcagcgtggccttgtaggtagcaaagaaatccacaaactcgctgtgttcggcgccgtgatcctgatcgggcagatagtagccccagtagccctgacgcaccgactgaataaacggtttgatcccatcgttgcgcgcgtgcatacgcccgccaaaacgacgacgcacggtattccacacgtaatcgaacaccgggttaccctggttatggaacatcgccgccatcttctgcccgccggaggccatcagcatcgccgggatatccacaccccatgcatgcggaacgagaaaaatcaccttctcattattgcgctgcatctcgtcgatgatcgctttcccctgccagtcaacgcgggcaaggattttctgcggatcgcgcaggcccagctcggccatcatcaccatcgcctgcggcgccgaggcatacatggcgtcgatgatcgcttcccgctcgtactcgcttttttccgggaagcagtacagcaaattaatctgcgcccggcggcgcgagcttttcgccagacgccctaccagacgaccgagtttgccgaggagcggatcgcgaaaggatggcggcgtcagcgcaataccggcgaaggcaaagacccccagccaggcgccccagtagcgcggcagtaaaaaggatttttcaaacttagggataaactcaatattattttttttcgtttccatgcccaatccgcagatcgactgcttaatcaagataatgggatagtgtagcgagacgtcgggtatcctacaaaagaaaaagccggcgccctggggcaccggctttccactgaccggtggttagtcaaaccgcagctgcggaacgacctctttgacctgcgccagatagtcggtccggtcggaaccgctcagcccttcggtacgcggcagcttagccgtcagcgggttgaccgcctgctggttgatccacacttcgtagtgcaggtgtggcccggtagagcgtccggtattccccgacagcgcaatgcgatccccgcgcttcactttctgccccggcttcactaacagcttacgcaggtgcatgtagcgagtggtataggtgcggccgtggcggatcgcgacgtaatacccggcagcgccgctgcgtttggccacgactacttcaccatcgcccaccgccagtactggcgttccctgcggcatcgcgaaatcgacgccacggtgcggcgcgacgcggccggtgaccgggttcagacgacgcggattaaagttagaggagacgcggaactgacgcgccgttgggaagcgcataaagcccttcgccagacccgtcccgttgcggtcgtagaatttgccgtcttcggcgcggatggcatagtaatccttaccgtcagagcgaagacgcacgccgagtaactggctttgctcacgtttgccgtcgagcatttcgcgcgacatcaataccgagaattcgtcgcctttcttcagcttacggaaatccatctgccactgcatggccttgatcaccgcgctgatttccgtgctggtcagcccggcatcacgcgcgctggagacaaagctggcgccgacggtgcccttcagcacgctgttgacccaatcgcctttctgcagctcgctgctcattttaaaaccgttatccacacgggtataggtgcgggtctcgcggcgggacatctcccaggtcaggctctgcagatcgccgtcggcggtcagggtccaggagagctgctggccaatcttcaggttgcgcaactctttatcggcggaggaaagctgggcgatatcgcccatatcgataccgtactggttcaggatgctgctgagcgtatcgccggtcgacaccacgtattcgtgcccgccggcatcgctatcggctttttcgtcgagctcatcctgaggaatggcttcttcttcctgtggggcctgatcgatcggctcggaggcttccggcagcagggagcggatctcgcttttttccagttcaatggttctgacgatgggggcggattccgggtggtaaatgtagggtcgccagacggcgaccgctaaggtaagaacgctaagcgaccccagcatgacgcgatgaggtcgtggcaaattgttgaatgcctgagtgacagcgcgggctatctgttgcacgtattcacttcctcgttaatctcctttcaggcagctcgaatactgattcgccagttgggtgaggaattgcgggtaactcgttttacccagcgtaattcctgtccccagtggatccagggtccccatgcgcacagacgtgccccgggcaacagcttcgataaccgctggcctgaactgtggctcagcaaaaacgcaagtggctttctgctcaaccagttgtgttctgatttcgtgtaaacgctgcgcaccgggctgtatttcagggttgacggtaaagtgccccagcgaggtcaaaccgtagtgtttttcaaagtaaccgtaggcgtcatgaaaaacgaaatagcccttccctttcagcggtgccagctcattgctcacctgcttgtcggtcgccgccagcgcggtctcgaactgctgcaggttgctgtcgagtttggctcgactctgcggcataagttccaataatttatcgtggattgcaaccgccgaaagccgcgctatctctggggataaccacagatgcatattgtaaataccgtgatggtgatcgccgtcacctttttctgctgcgccatggtcatgaccatggtgatcgtcatcgtcgtccgccccggtgatgagcagcggtttgaccccatccagcacggcaatcgtcacctttttattcgccgcaatgctttgcgtcgacttatccataaaggcttccatttccggaccaatccacaccactaagtctgcgttctgtaagcgttttacatcagaaggacggagggaataatcatgctcggaggcgccatcgggcagcagcacctgggtctcggtcaccccatcggcgatggccgccgcgataaagcccagcggtttcatagaagtcaccacggcggcgctggccagcggtacctgcgcgaacaaaaaaacagcgccaagtccagcgcaaagaagcgtatttttatgtaacataatgcgtctagtcatcgaaataagtgagtgtgatgtgatattataacattcactagcttgtgcaacccctaaattactatgacaaaccttgtaacgctggaaaatgtctcggtggcctttggccaacgccgcgtgttgtctgacatctcgctggctctcacgccaggcaaaatcttaaccctgctgggccccaacggcgccggcaaatcgacccttgtgcgggtggttctcgggctggtagcaccgacagagggtgttatcaagcgtgacgcacgcctgcgcatcggctatgtgccgcagaaactgcatctggacgccacgctgccgctgaccgttagccgcttcctgcgtttgcgcccgggcacccgtaaagacgacatcctgccggcgctgaagcgcgtgcaggcggggcatctgatcgatgcgccgatgcaaaagctctccggcggcgaaacgcagcgcgtactgctggcccgcgccctgctcaaccgtccgcagctgctggtgctggatgaaccgacccagggtgttgacgtcaacggccaggtggcgctctacgatcttatcaaccagctgcgccatgaactggactgcgcggtgctaatggtatcccacgatctgcatctggtgatggccaaaaccgacgaagttttgtgcctgaaccagcatatctgctgctctggcgcaccggaggtggtctccatgcacccggagtttatctccatgttcggcccgcgcggcgcggaacagctggggatataccgccaccaccataatcaccgccacgaccttcaggggcgaattgtactgcgtcggggaaacagccgctaatgattgaacttctgttacctggctggcttgccgggatgatgctggcctgcgccgctggtccgctgggctcctttgtggtctggcgccgcatgtcttatttcggcgacacgctggcgcatgcgtctctgctcggcgtcgctttcggtttattgcttaacgtcaatccgttctatgcggtgatcgccgtgaccctgctgctggctggcgggctggtgtggctggaaaaacgaccgcatctggcgatcgataccctgctgggcatcatggcgcacagcgcgctgtccctggggctggtggtggtcagtctgatgtctaacgtccgcgtcgatctgatggcgtatctgttcggcgatctgctggcggttacgccgcaggacctgatcgccattgccactggcgtggtgattgtgattggcattctgctctggcagtggcggaatctgctggcgatgaccatcagtccggacctggcgtttgtcgacggcgtgaagctgcagcgggtcaagctgctgttgatgctggtcaccgccctgactatcggcgtggcgatgaagttcgtcggggcgctgatcattacttccctgctgattatcccggccgccaccgcccgccgttttgcccgtacgccggagcagatggccgccgtggcggtgggcgtgggcatgctggccgttaccggcgggttaaccttctcggctttctatgataccccggccgggccgtcggtggtgctctgcgccgcggtgctgtttattctcagcatgacgaaaaaagccgccagctgaaaatgaaaaagcccggtcacgctgctgaccgggcttcaccatgaactgctcaaccgcaacgcgctacggcatttccggcggcgtaatcccgaaatgattccaggcgcgcaccgtcgccattcttccccgcggcgtacgctgcagaaagccctgctgaattaagtagggctccagtacatcttcaatggtttcccgctcttcgccaatcgcggcggcgaggttatccagccccaccgggccgccaaagaacttatctatcaccgccagcagcagcttacggtccatatagtcgaacccttccgcatcgacgttaagcatatccagcgcctgggcggcaatatcggcggagatggtgccgtcgtggcgcacttccgcaaagtcacgcacccggcgcagcagacggttggcaatacgcggcgtgccgcgtgaacggcgggctacttccagcgcgccctcgtcgctcatctccagccccatatggcgggcgctgcggctgacaatatgctgcagatcggggatctgatagaactccagacgctgcacgatgccaaagcggtcgcgcagcggcgaggtcaacgaaccggcgcgggtggtggcgccgatcagggtaaacggcggcagatcgatcttgatggaacgcgccgccggaccttcgccaatcataatatccagctggtagtcttccattgccggatagagcacctcttccaccaccggcgagaggcgatggatctcatcgataaacagaacatcgtgcggttcgaggttggtgagcatcgcggcgagatcgcccgccttctccagcaccgggccggaggtggtacgcagattcacccccatttcattggcgacgatattggccagggtggttttccccaaccctggcgggccaaaaatcagcaggtgatcgagggcgtcgccgcgcagcttcgccgcctggataaagatctccatctgcgaacgcacctgcggctggccgacatactctgccagcaattttgggcggatggcgcggtcagcggcctcttcaaagccgctgctgtctgccgataccagccggtctgcttcaatcatcccttacctcacaacgcagcgcgcagcgcttcgcgaattagcgtttcactgttggcgtccggacgcgcgatcttgctgaccatccggctggcctcctgcggtttatagcccagcgcgaccagcgcggcaaccgcttcctgctcggcatcgtccgccgttgggcctgccggcgaggtcagcaccagatcggccgccggggtgaacaggtcgccgtgcagccctttgaagcgatctttcatctcaacgatcagacgttcagcggtttttttgccaatccccggcagcttcaccagcgaggcgacctcttcccgttcaacggcgttgacgaactgctgcgccgacatgccggagaggatcgccagcgccagcttgggccccacgccgttggttttaatcaactctttaaacagggtacgttcctgtttgttgttaaacccatacagcagctgggcatcttcacgcaccacaaagtgggtgaagacgatcgcctcctgcccggcctccggcagctcatagaagcaggtcattggcatatgcacttcatagccgacgcccgccgtttccagcaacaccagcgggggttgtttttcgagaatgatgcctctgagtctgcctatcacgtggggctcctgcgttatggtctaagtatctggcggtatcataaaaaaaggctggatagatatccagcctgatttgcgattatcgtaagcgcccccgcgccagattgagccgggtctcgctgatctgagcggcattctggctgacatggcaatgggtgatggcaatcgccagcgcatccgccgcatccgcctgcggattggcgggcagcttgagcaaggtgcgcaccatatgctggacctggctcttttcggcgctgccaatcccgaccacggtctgcttgacctgacgggcggcgtattcaaacaccggcagcgcctgattggtcgctgcgacgatcgccaccccgcgcgcctgcccgagctttaacgccgagtcggcattcttggccataaagacctgctcaatggcgaaatagtcgggctggaactgggtgatgatctccgtcaccccggcgtagatcagcttcagccgcgacggcagatcgtccactttggtgcggatgcatccgctgcccaggtagctcagctgccgcccaacctggcggatcacgccataaccggtaacgcgcgaccccgggtcaatgccgagaataatagccatcacgcgcctccggttaaccgtggatgcggctgcatcacagggtggctgcgacctcgtcggagatctcgccgttatggtacacttcctgcacgtcgtcgcagtcttcgagcatatcgatcagacgcagcagcttcggcgccgtctcggcatccatatccgctttggtggacggaatcattgagacttcggcagcgtcggctttcaggccggcggcttccagcgcgtcgcgcacagcgcccatctcttcccaggcggtgtagacgtcgatggcgccgtcgtcataggtcaccacgtcttctgcgcctgcttccagcgccgcttccatgatagtgtcttcatcgcctttctcgaaggagataacgcctttcttgctgaacaggtaggagacggaaccgtcggtgccgaggttacccccggttttggtgaaggcgtgacgcacttccgcaacggtacggttacggttgtcggacagacattccaccatcaccgcggtgccgccaggaccgtagccttcataaatgatggtttccatgttcgcgtcttcatcgccgccgacgccgcgcgcgatggcgcggttcagggtgtcgcgagtcatgttgttagacagcgctttatcaacggccgcacgcagacgcgggttggaagccggatcgccgccgcccagacgcgcggcggtgaccagctcgcgaatgattttcgtaaagattttaccgcgtttggcatcctgtgccgctttgcggtgtttggtgttggcccatttactatgacctgccataaaaaactctccaaaaagcgcgccctttcaggcggcgttaattacaaattcttcaatcgcctgccggttgctccacgacttggtcagcgcagcggcttccgtcgcgctgacccagcgataggccagatgttcggtgaaagtaatctcccgctcatgaggcagcgcaagacagaaccagaattccgtattgcgctctacacccggcgcatagcgatgacgcaaatgagaaaatatctcgaactccaccgtgcgctgacagtcgattaaggtcagttgctcgcaggcaacgtcaatggcgacctcttcctttacttcacgcgcggcggcctgcagcgcggtctctccagcttccaggctgccggtgaccgactgccagaacgcgggatcgtcgcgccgctgcaacatcagcacccgtttcgtatcttcggcgtaaatcaccaccagcaccgaaacgggcagcttaaatgacatattacttgttctccagagacgcttttgcctctttctccacaacctgaatacccagttcaccgagcgccgcaggattggcgaagcttggcgcttcggtcatcaggcaggcggccgcggtggttttcgggaaagcgataacgtcgcggatgttatcggtaccggtcagcagcatggtcagacggtcaagaccgaaggccagacccgcatgcggcggcgtaccgtacttcagtgcatccagcaggaagccgaatttctcacgctgttcctgttcgttaatgcccagaataccaaatacggtctgctgcatctcgccgcggtggatacgcaccgaaccgccgccgacttcataaccgttaataaccatatcgtaggcgttggctacagcctcttccggggcggctttcagctcatccgcggtcatatctttcggcgaggtgaacggatggtgcatcgccgtcaggccgccttcgccgtcgtcttcgaacatcgggaagtcgatcacccacagcggcgcccatttgctctcgtcagtcagactcaggtctttacccagcttcagacgcagcgcgcccagcgcgtcggccactactttcttgttgtcggcgccgaagaagatcatgtcaccatcctgcgcgccggtgcggtcaaggatcgcttccacgatttcagcggtcaggaatttggccaccgggctgttgatcccgtccatgcctttggcacgctcggtcactttaatataggccagccctttcgcgccgtagatcttcacaaagttgccgtattcgtcaatcagcttgcgggtcagagaggccccgcccgggacgcgcagggccgccacgcgccctttcggatcgttggccgggccggcaaagaccgcgaattccacagacttcagcaggtcggcgacgtccaccagctccatcgggttacgcagatccggtttatcggagccatagcgacgttcggcttcggcgaaggtcatgatcgggaactcgcccaggtcgacgcctttcacttccagccacagctgacgcaccatcgcctccatgatctcacgcacctgcggcgcggtcataaaggaggtttccacgtcgatctgggtgaattcaggctgacggtcggcacgcaggtcttcatcgcggaagcatttgacgatctgatagtagcggtcgaagccggacatcatcagcagctgtttgaacagctgcggcgactgcggcagcgcgtagaatttgcctttgtgcacgcgggaaggcacgaggtaatcgcgggcgccttccggggtggctttagtcagcatcggggtttcgatgtcgaggaagccatggtcgtccataaagcggcgcacaaagctggtaattttcgcgcgggttttcaggcgctgcgccatctccggacgacgcaggtcgaggtagcggtatttcagacgcgcttcttcggtgttgacgtgattggagtccagcggcagcgattctgagcggttaatgatcgtcagatcggaagccagcacttcgatagcgccggtggccatgtccgcgttgatgtttttctcttcacgcgcgcgaacggtgccagtgacctgaatgcagaactcattacgcagttcagaggctaacttcaacgcatccgcacgatccggatcgaaaaacacctgaacgatgccttcgcggtcgcgcatatcgataaaaatgaggctaccgagatcgcgacggcggttgacccaaccacacagagtcacctgctgcccaacgtgggactgtcgaagctgtccgcaatattctgtacgcatgagatatcccttaacttagccgtcggcggattgtcgtctgccctgcaggcgacgaggtcgcagctttagctgatgtcacaactgaatgaaaaaaggcggctattatactggaaattctgtcgttcgataagtccgacgcacgatgtacgctgctttgctgcgcgcttaacgtccacactcacataaattaacaaaatttgttactcttttgctgaagccgcaaaggtattgtagccgcctgacaacagatgaagatacggggataccatgttagaactcaatgcaaaaaacacggcgctggtggtaatcgatctgcaggaaggcattctgcctttcgccggcggcccgcatcgggctgacgaggtggtggcgcgcgccgctcgcctggcagacaagtgccggcaacagggttcgccggtcatcatggtccgcgtgggctggtcggccgatttcgccgaagcgctgaaacagcctgtcgacgctcaggccggggcgcatacgctgcccgaaaactggtggacctacccggccacgctgggtaagcaggagagcgatatcgaagtgaccaaacgccagtggggcgcgttctatggcaccgaccttgagcttcagctgcgccgccgcgggatcgacaccattattctctgcggcatctccaccaacatcggcgtcgaatccaccgcccgcaatgcctgggagctgggttttaacctggtcatcgccgaagatgcctgcagcgccgcctccgccgagcagcatcagtgcagtatgacgcatattttcccgcgcatcggccgggtgcgcagtaccgaggagatcctcacggcgctatgatttatattgggcttccccagtggtcgcacccgaaatgggtgcgccttggcatcaccagccttgaagagtacgcccgccactttaactgtgtggagggcaacaccaccctgtatgcgctaccgaagccggagattgtcgcccgctggtatgaacagactcacgatgacttccgcttctgcttcaaatttccggccaccatctcgcaccaggccgccctgcgccattgcgacgagttaagcagtgaattttttgcccgcctggcgccgctggcctcgcgcatcggccagtactggctgcagctgccggcgacgttcggtcctcgcgatctccccgcgctatggcattttctcgacggactgccgaaggatttcacctacggcgtcgaagttcgtcatcccgagtttttcgccaaagaggaagcggaacagcagctcaaccgcgggctgcacgagcgtaacgtcaaccgcgtgatcctcgacagccgcccggtccatagcgctgcggccaccagtccggcgatgatcgatgcccaacaaaagaaaccgaaggtgccggtacatgcggtgatgaccgcccgacagccaatggtgcggtttatcggcggtgacgatatggcccataaccgggaactgtttcgcgtctggcttcagaccctggcgaagtggcatcagtcggggaccccgtggttgttcctgcataccccggacattgctttcgccccggcgctggtggataccctgtggggtgacctgcgcgctgccctgccggcggcaggaaatgcgccgtcgattccgcagcaatcttctcttttctgatatcctgctatcatatccggagccatctgccagagttaaagggagttttcgtatggtcagcgcgctgtatgccgttttaggtgcgttattgttagtgaagttctcatttgacgtggtgcgtctgcgcacccaataccatgtaggctacggtgacgggggctttagcgagctgcaggttgccatccgcgttcacggcaatgccgtcgaatatgtgccgattggcctcattttgctgttatttatggagatgaacggcgctcagacctggatggtgcacgtttgcgggattttattaattgtcgggcgactgatgcactcctggggttttcatcaccgcgtctactactggcgccgctccggcatgagcgccacctggtgcgcgttgttgctaatggtgctggccaatctctggtatatgccctgggagttggttttctccctccgttagcgcacaatacgccgttttcgttttttcgggtttaacgttatgtctcaccgcgatacgcttttttccgcgccgattgccagcctcggcgactggacctttgatgaacgggttgctgaagtcttccccgatatgatccagcgttctgtgcccggctactccaatatcatctcgatgatcggcatgctggccgagcgcttcgttcagcccaacactcaggtttacgatcttggctgttcgctgggcgccgccaccctctccgtgcgccgcaatattagccatccggactgtcgcattatcgccatcgataactcgcccgcgatggtggagcgctgccgtcgccatattgacgcttataaagcgccgacgccggtcgaagtgattgaaggggatatccgcgacgtgaccattgaaaacgcctcgctggtgatcctgaactttactattcagttccttgagccgggcgatcgccaggcgatcctcaataaagtctatcaggggctgaatccgggcggcgcgctagtgctctcggaaaaattcagcttcgaagacgcccacgttggcgaactgttgttcaatatgcatcatgactttaagcgcgccaacggctacagcgaactggagatcagccagaaacgcagcatgctggaaaatgtgatgctgacggactccgtcgaaacccataaagcccgcctgcgtcaggctgggtttgaacatgccgaactgtggttccagtgctttaactttggctcgctggtggccgtgaaagccggggagcaggcatgatcgacttcagtaacttctatcagctgatcgccaaaagcccgctgtctcactggctggagacgctgcctgcccaggtagccgcctggcagcgcgatgccctgcacggcaagtttcgtgaatgggagcgcgccgtagaatttctgccggagctaacgccctggcgtctggatcttctgcacagcgtcaccgccgagagcgaaacgccgctcagcgaaggccatcagcggcggatcgaaaatctgcttaaaaacctgatgccgtggcgcaaaggcccttattcgctgtacggcatcaatatcgataccgaatggcgatccgactggaaatgggagcgcgttctgccgcacctgtccgatctcactggccggactatcctcgacgtgggctgcggcagcggctatcacatgtggcgaatgatcggcgccggcgcacatctggcggtcggtatcgatcccacccagctgttcctgtgccagtttgaagcggtgcgtaagctgctcggtaacgaccagcgggcgcatttgctgccgctgggcatcgagcagctgccggcgctggaggccttcgacaccgtgttctcgatgggggtgctctaccaccgccgctcgccgctggaccatctgtggcagctgaaagatcagctggcgccagggggcgaactggtgctggagacgctggtggttgaaggagatgaaaatacggtgctggttccgggcgaccgctatgcgcaaatgcgcaacgtctattttatcccctcggcggcggccctgaaaatgtggctggagaagtgcgggtttattgacgtgcgtatcgtcgacgcctgcgtcacctcgacagaggagcagcgacgcaccgaatggatgacgaccgaatcgctggccgatttcctcgacccacaggatcagcgcaaaacggtggaaggctatccggcgccattacgggctgtgatcattgccaccaaaccggaaacccagcagtcgctggcgaaaaaagcgagataaaaaaaggcccctgtttaatgggcaggggcctggtacgggcaatcatcatattgggcgacatgatgtgcagcaaaaaaccgtttaacttctccaggcggagataatccttttcatctccgccaccgctgcgccattcacggcgtagcgtctgtattcatcggcatcgggatcggctgacatcgaaacgcccggatgacgaaagcgcatttccgacggcaaccagtggccagccgagctatggacctctttcacccccgcctgcagaaacagcggcaggttcgcggcgcggactcccgcaccggccataatgattggagtatcccctgcggcaataagttccgtaattaatgaaatacctttctccgccgaggattgctgaccggaagtcaggatacgtttgacccccagcgtccccagcgttttccaggcctgacgcgggtcagcgcacagatcgaacgcgcgatgaaaggtcaccgccagcggcccggccgcggccattatttttttcatccgcgggatatcgacctggccatcagcatccagcacgccggtcaccagcccgggaaagcccagatcccgcaccatgcgaatatcgttaagcatcgcggcgaactcttcctcggtgtagcagaaatcgccgccgcgcgggcgaacgatcggatgcaccgggagagtaatcgcctcgcgggccgagaccagcaccccataagagggggttaatcccccttcctgcggcgcggcgcagagctcaatacgatcggcgccgcagcgctcagcctcccgggcgcacgccacgctgtagcaacacacttccagtaccgccattcctctctccctgatccagacaacctttgcagcatgtcacaatttcacgcggcagacgccgcgcggcttcacactgttacgtatcggcttgctcgctggcgacgatttgttcaatagaccacggatgaaatttgaccgtcacgctgccgtcggtcaccgccagggtaggattcggcaggcgctcatgctcccctttcggcgagctggttttgaccacgatccccggctggctgagtccgtcatcggccagcagcgccagagcgcgggcatttaaggttgccggatcgccgggcaggacgatttcgatatgctcccagccttcatggggataacgcttttcacccggccacggcagctcaacgatatggaagcgccagtgcgccacgcagaccggctccgccagtttgaacaggcaaatgggccggccgttgatcatattctccgacagcagggtgccgcactgctccagaccgcggcgccagcgttccgcagtggtattctgatgacagcgcagggagatatggtcggcgtcgagcccggcgatctccagtcccagtcgcgcagtgaagcgctgaagcgcatcggaaaatcgcgagagatccgccgtaatatcggccagttgttcattttgctgccagtttgccatgggtttgctcgtcaataatgctcgtcagtaatgaaaaggtaatttaccgtgtttcggcctgcggaccaaccgccgccccgctgatgggcaactgaccggcgatggattgcgcacgccggcgcgccgcgcgcaatgctgacggacggggacaaatgcagtatactcccgccctaatttgtccacattatggcgccgcctccctcgggggcaggcgcattacacgtaaggtattccggtgaatattcaggctcttctctcagaaaaagtcagccaggccctgatcgcggcaggcgcgcctgccgattgcgaaccccaggtccgccagtcagcaaaagttcagttcggcgactatcaggccaacggcgtgatggctgtcgccaaaaagctgggtatggcgccgcgacaacttgcagagcaggtactgtctcatcttgacctcaacggcattgccaacaaggttgaaatcgccgggccgggctttatcaatattttcctcgaccccgcgtttctggcggacaacgtcaaccgcgcgctgcagtctgagcgcctgggcgtcacgaaaccgcaggcgcagactatcgtcgtcgactactcggcacccaacgtagcgaaagagatgcacgtcggccatctgcgttcgaccatcattggcgatgcttcagtccgtaccctggagttcctgggtcataaggtgatccgcgccaaccacgtcggcgactggggcacccagttcgggatgctgatcgcgtatctggaaaaacagcagcaggaaaacgccggcgaaatggccctggccgacctcgaaggtttctatcgcgaagcgaaaaagcactatgacgaagacgaagccttcgccgagcgcgcgcgcagctacgtggttaagctgcagggcggtgatgagtacttcctgcagatgtggcgtaagctggtcgacatcaccatgtcgcagaaccagatcacctacgatcgcctgaacgtcaccctgacccgcgatgacgtgatgggtgagagcctgtacaacccgatgctgccggggatcgtcgccgatctgaaagccaaagggctggcggttgagagcgaaggcgccaccgtggtcttcctcgatgagtacaaaaacaaggaaggcgaaccgatgggcgtcatcatccagaaaaaggatggcggctacctctataccaccaccgatatcgcctgtgcgaagtatcgctatgaaacgctgcacgccgaccgcgtgctctactacatcgactctcgtcagcaccagcacctgatgcaggcgtggaccatcgtgcgcaaggcaggctacgtgccggactccgtgccgctggagcaccatatgttcggtatgatgctggggaaagacggcaagccgtttaaaacccgcgccggcggtaccgtgaagctggcggatctgctggacgaagcgctggagcgcgcccgtcgcctggtggccgagaagaacccggatatgtcggctgacgagctggaaaatctggcgaaagtggtgggtatcggcgcggttaaatatgccgacctgtcgaaaaaccgcaccaccgactacgtcttcgactgggataatatgctggcgttcgaaggcaacaccgcgccgtatatgcagtatgcctatacccgcgtgctctccgtgttccgcaaagccggcatcgacgaaaacgcgatgatcgacgcgccggtggtcatcgccgaagatcgcgaagctcagctggccgcgcgcctgctgcagtttgaagagaccctctccgtggtcgctcgcgaagggacgccgcacgtgatgtgcgcctacctctacgatctggcgggcctgttctccggcttctacgagcactgcccgatcctcagcgcggaaagcgaagagacccgcaacagccgtctgaagctggcgctgctcacggcgaaaaccctcaagctgggtctcgataccctcggtatcgaaaccgtcgagcgtatgtaacaagcaacccggcgaaagccgggttagttttattcggcgcctcgccagcggggcgccctgctcagaagtacttgcgtagatactccgtcagacaaaggatcgccatcgcctgaccgtagggcatcgaggtaagcgggatctggcgataaaagtcgaggtctgaccccatcccggtgccaaatgaggtctgcagcagctccccctgcggcgaaatattctgcacaatcccgcgaatcgctttttcagccaccccggcgtagtgctgcccgacgtaacgcttgcgcaccgctttgagaatcccgtaggcaaagccggcggtcgccgaggcctcaagataagagtgcgggtcgtccagcaaggtatgccacaggccgctgtcgtcctggcattctgctaaggcggcaatctgtgcgtcgaggactgtaatcagatagcgccgtaccgcgttcccctcggggagatccaccagttccagaaaatccgggatcaccatggtgagccagctgttgccccgcgcccaacgcgcccgggcaaagttatgccgcccctcatagttccagccgtgaaaccacagcccggtctcccggtccatcaggttctgcacatggagcaggaactggtaggttgcctcctccacatactgggggcggttaagcagcttgccaattttggctaacggcaacacggtcatcatcagcgtgtcatcccacatttgctgatggttctcctccgccagagtcatgtgctgcataccgccctgctcggtgcgcggcatctcgtgcatcgcccactccgcccagctctccagccacggcagatacgccatacggccggtctcttcaaagcggtaagccagggtcagaaacggggccatagtattgacgtttttggtcgttgctccctcggcgaagcggtcggcaaaccagcgatcgatgatatcacgcatctcgatatcgccggtttgctggtaatactgatagatgccgtacagcccaacgccgtgggtccactcccagccggcccagcctttggtatcgatcacgcgcccgtcatccaggcgtagtaaaaattgcccgctctcatccttaatattcaccaggttttgcgtcacgttgcggatcagcgcctgcagttcgctacgggcgataaaacgctcaggctgacgcagtaatgggctatgtttgaccggccaaactttcatgttgttaacctcgggtatatgtcgaattcaaagcgccgcccttaatgagcgccggggcagcaggtttatgacgattcagatagccaatattgttattgccccacagacagtcgtaaggcatccccgccagcagctcgaccaccgcgcggtgttccgcactggtctgttccgactgcgcgtagccgagctcgcgcattctgagggtctcgctgcgcaggacgctgtgggtgtgcaggttgagcttgaagcgcagcgagacgaggaagccgcaggctaacaccaccagagtgccgacgctgaggatcagcagaatggtatggctgaccccttcaggctgtattttttgcccggaaacaaaccccgacaactgcataatgatccccaccagcatcaccgcccccgcctgcgaggctttgcgggtcagagtcatgatgccggcaaaaatcccctcccggcgctggccggtgatcgcttcgtcgacgtcggcaatataggtgtaggtattccacggtacgtaatttatcccgccgcgtcccagtccggcgacagcagagatgagcagcaataaggaatagacgtcgctcagtccggcgtaatagagcagcgcgtaggagagtgagctcaggccaaacaggaccaccaccatgcggtacgacggcgcggggccaaaacgaatgcacagcgggatcatggcgattactgcaataaactggaagatggccatcgtccccagcaggttcgaggcgacggcggcttcctgcatcagaacaaagaccacgtaataggtaaacacggcattgaagacgtcctgggcgatatagccccccagatacatgccgaggtgctggcggaaaatttttatccgcagcgtagaactcagctcaatcaccaggcgattgaggctctgagcaagggttaagttttgtttttccgcttccgcccgcagggccgcttccgaccacgcctcccgcggtcgttcccaggtgaaacaccagaccagagtcagcatcaccgcgcacagcaccgagaacaccagactggcatagaagaacgagctggcattatctttgccgagccaggagagaaggatccccggcaggaaggaggctaaaatcgccgacatctgcgccatcgaaatgcgcgcgccggagaatttggttttctgtttaaagtcatcggtcatctccggcaccagcgtctcatagggcaccagaatcatggtatagaccatatcaaacagcagataggtcgccaggtagtaccagaagcccatctcgccgacccacatcgctgaatagctgaatacgcaggggatgccgagcagaataaagaattttctgcggccgaagcgcttaccaagccaggtggtgccaaagttatcggtgagaaagcccatcagcgggcttaccaccgcgtccagcacgcgggcggcagcaaaaataagcgtggcctcaatcggggtcagtccgcaaaaggtcgtgtaaaagtagagcagccatgcggcggttagcgccgtcgtgccggcgccgagaaaatcgcccgcgccgtaggccagatagttagccagtccaatttttcgtgttttcatcgccgtgatcctgtgtctttttttaaaagaacgccgacaatcgttccggatttgccaccggaagggagtgggtacctggctacactaaaagctgtgaaaggaggttacctttgtacttttgccacggaacagtcgccggtggcaaaatgacaaagagatgacgtcgccacttcactcatttataaaacagcatttctctttaatcaaaagacaggttcattgatgtgatctggctggaaggtcgccgactgacgaacaggctcgcaaatcccgggatcggcccttgcgcagtcggggaaacaggagtaaagaatggaagaaagggttattccgcgtatctcaaggaggccagatgccttatacccatctgctggttgccgtcgcgccaacgccggagagtcaggtgttaattaaaaaagcggtgtcgatagcccgccccgttaacgcgaaagtgagcttaatcactctcgctacggatccggagctgtataaccagttcgccgcaccgatgatggaaaatctgcgcgaagtgatgcaggaagagacgcgggagtttctcaatgagctggctcgccacgcggactacccaatagaaagaatgaccatcgcctgcggcgagctaggccatcatattaaggacttctgccggtcacaccgtgttgatctggtgatctgcggcaatcacaaccattccctcttctcacgcgccacctgctcggcgaaaaatatcgtcggcagctgcggcgttgatgtcctgttggtttcccttgaaaagggctaacgccggttagcccttttcctgaactaggccagtttagggaaggtggctatcttcccccgcagacggctctcctcgctgcgcggtgaaatatgctgcagatcctcgacaaagcgcgcctgccagttatgaatatcattttctctgatcacgtccagcatcgctgaatgacgggcgatacgttccgccagcggcatgctgagcgcgcgatccagcgcggcggcaacctcgtcgcgatcgtaaggattgacgatcagggcgctggtcagctcctgcgccgccccggcaaactgcgacaggaccagtacgccagggttatccggatcctgcgccgcgacgtactccttcgccaccagattcataccatcgcgtagcggcgtcaccagcccgacgtcagagtagcggaagaccttcatcagcagcttacgatcaaaatgctgattcagatagtagagcggtgtccagccaagctgaccaaactgtccgttgatgcgtccggctgcggtttccagctggtggcggatatcctgataggcctgcacatcgccgcgggaggtcggcgcgatctgggtataacggattttgccgtggtgctgagggtacttctcgagcagcgtctcgtaggcgaggaatcgctccggcaaccctttcgaatagtcaagacgctccacggagaagatattcttcacatttttcagctcgttcttcagctgggccagcttcggcggcagcggacctttagcgttgcgcgtaatttcgtccggatcgatccctatcggataaacctcggtactgaacgccttaccccatgcctgatagcgtttatccccgaggtcggataggcgagtctgcatagcaatgctgtcgagaaaagcggttctgtcgctttcggtctggaagcccagcagatcgtaatcgcacagttgctccagcagctcagcgtgcggcggcagagcgttaaaaatctccggcgtcgggaacggaatatgtaagaaaaacccgatgcgattgttcaccccgcgcttgcgcagctcgctggcgaagggcagaagatggtaatcatggatccacagcgtatcgtctggctcaatcagcggcagaagcttgtccgccagcatggcgttaacccgcagatatccctcccaggcttcgcgctgaaagctgaccagatcaaggcgatagtggaaagccggccacagcacggcgttagagaactggttgtagtattcatcatggtcccgttcattaaggttgaacgacgcccaggaaatattcccgcgggagacctgcttgagcggctgctggtcatcgccaatctcgccgctccagccaaaccacagaccccccgccgctctcagtgcccccaggatgccgacggccagaccgccagcgctcgattttttatcgtccggtaaggcgatacggttagagactacgactaaacgactcatggtcatccctcctttcggtttgcgcgtcatacgccagatgttgcaaccacgtccttacagcggcggcatccgccaaccgccagtgcgcctgagtttccccggcgccaacttttaccgacattccctgcagttgattaacgacgctgaatcccgcctcgtcggtcaaatcatcgccgacaaaaaccggttcgcggccggcgaatggcgcctcctgcatgaacgcggtaatcgcctcccctttgttgacgccgcggggtttaatctccaccacgcacttgccaagctgtaacgccagcagcggatagcgctgaacaatccgctgcgccagctccagcacggcgctctgctgctgcggggcctggcgatagtggagcgcgaaagccatctctttactctccagctcacatcccgggagcgcttccagcgccgacgtcagctcagccgcgatctcatcgcgcagcgctgtcggcagagagacgatgtaggttttaccattgatatcacggcgctcggccccgtgaacgccggccagcggtagccgccagggatgggttagcgcgtcaagttcagccattgagcgccctgaaatcaatgccaccgcgcccccctgctgctgagccagcgcattgagcgcctgcagcgtgctgtcgggtatcaccacctgatcggggtgcggctggatatcggcaagagtaccgtcgaggtcaaagaaaaaagcgtagtttccggttagcgcaggcggtacagatatctggttatccaccctgtttcctccttatcatggccagccgaagctggttgttaattatatgtgagccatgtaagtatagacagtgtgaccaacctcgccatttttgatagttaccgccagcgaaacgggcgctggcggcaattactctgtaaactaaaaagttcggtttaaattcaggccgcacgtttggctttttgtttgtagcggtcgaagatcaccgccgccagcaggatcaccccgcgcacgacgtattgtgagaatggcgagatattcagcaggttcatcgcattttccacggttccgaggatcaggatcccggccaccacgtaggagatcttgccgatcccgcccttcagcgacaccccgcccagcacgcaggccgaaataacaatcagctcatagccaatcgaggtcatcggctggccgctggtcatccgcgacgccagaatgatacccgctgcggccgataccagaccggagagcacaaagataataatcttggtgcgcaccaccgggacgccggccaggcgcgccgcctcttcattgccgccaatagccagcgtattacggccaaaggtggttttgtttagtaataatccgaaaaccaccaggcaggcgacggtcagccagatcggcgccggcagaccaaaccagttggcgtagccgagggtgaagaaacgttcatcttcgatccccaccgctttgccgtcggagataatataggccaggccgcggacaatctgcatggtggccagcgtggtgatcagcgcgttgatcttaaggcgcgcaatgacaaagccgttaaccaggccactaagcgcccccagcaacaggcctgcggcgatccccagccacaggctttcgctgagattaatcaccaccgcggtggtgaccccggcgcaggcgataaccgacgccaccgacaggtcaaaatcgccggaggccaggcaaaacagcatgccgcaggccaccatcccggacatcgagatcgccagccccagccctttcatattgacgaatgaagcaaagttgggcacaaaaatcacacagccgataaacagcaccgcaaacaccaccagcatgccaaactgatcccagatgcgggcaaagctaaaggttgagcgggtagccccggacgtagtcactgatgacatcatttactccttactcaggcgacagcctggctcactgttggcatcgcaaggcttaacgcctgctgttcattggcttcttcatgcagcagttcgccagcgatttgtccttcgcgcatcaccacgatgcggtcagcgacgcccagcacttccggcaggtcgctggaggcaaacaccacggcgacaccggaggcggcgaggccatagatcacattgtaaatttcatgtttggcgccgacgtcgatgccgcgggttggctcatcaagcaggatcaccttcatctcttccgacagccagcggccaaggatcgctttctgctggttgccgcccgacaggttcataatcagctgttccgggcccggcgttttaatattcagcgactggatatgttgatcggcgttgtccgcctcccaggcgttgttgatcaggcagccagcgtgaatatgcttgcgccgggcgctgatattgatgttatcgcgcacggaatgcaccggaataatcccctccgctttacgatcctccgggcacagcatcatcccggcctggatggcctgggccggtttgcgaatggagacgggctggccatcgatatacacctgaccgccggttatctgcgtgccgccaaacaggcctttcattagttcgctgcgcccggcacccaccagtccgaacaaaccgacaatttcaccgctgcgcaccgagagactaaccggcgtgcgcacgcccggcgctttgacctcctccaggcgcagccgctcctcgccataggggcgaggcttccagccataaatatcgcccagattgcggcctaccattgcctggaccagggcgtcgtggctgacgctcggcatatcgtcaaaggtgcaaacgtagcggccatctttaaagacggtgatggcatcgctgagggcaaaaatctcttccatccggtgtgaaacatagatgatgacccttccctcctcccgcaactcgcggatgacgcgaaacaggttgtcgatctctctggcggagagcgagctggtcggctcatcgaacgcgataatcttggcgttacgcgccagcgctttggcaatctccaccatctgccattgaccaatggagagatatttcagcggcgtctccgggtcgatatccagacccagatgctccagctgcaggcgggcctcatagttgagcagcgagcgattgacgatgccgcctctgtgcggcagctgaccgagatagatattttcggcgacggtcatctccgggatcagatgcagctcctggtagatgattgccacgccggcattcagcgcctccatggtattggcgaatgccatctgctggccgccgatctgcagatggcccgcggtcgggatatagttgccgctgagaattttcaacagcgtcgatttgcctgcgccattttcgcccatcagcgcgtggatctgtcctgggtagcagtcaaaactgatatcggacaaggcctttacgccagggaacgtcatggtgatgccgcgaaatgagagataaggggtagactgttgcataacgactccgctcttctgcactcagcccccgcgccgcggcgggggccagtttaatcaggctgttacagcccttttttcgccagctcttctttgaagttatcgcgggtaatcagcaccacatcggtcaccgccgtgaacttcggcggctcgacgcccttggtgacccagttgtatagcatttcgctggttttgtagccgtggatatccgggcttggcagcagagaaccatagaagccggtcggctgcgccttcgacagttcgttgacggcatccacgccgttgatgccgatgccaatcacatcgggagctttaaagccctgaccttcggtcgcgcgcacgccgccgaggacggtgttgtcgttcatcccgacgatcagccagtgtttaacctgcggatgttggaccagcatcgagttaccggcgtcgaacgctcccgggatatcgttggattttgtcggcacgcggtagatttgcgcgtccgggaagccggccgccttcagggcatcgatggagccggtggtgcgacggcgcgcggtatccagctcatcggcggtgatcgccattacggcggtgtctttgacatcccagccgcgcttttgcatctctttatagagttcctgcccctgacgggcgccaatttcgctcgccgccatcatcaccagcggtacgctctccatcggtttgcccttcgcattgacgaactggtcatcgacggtaatcaccttcatgtcatagccacgcgctttggcgacaatcgccgacccgagtttgggatcgggggtacaaatgacaaagcccttcgcgccgctggccgccaggctgtcaatggcattcagagttttctccccatccggaaccgcaattttaataacgtcaaagcctaaatcttttcctgctttatcagcaaatttccactcagtctgaaaccatggctcttccggctgtttcaccagaaaacctagtttaagattttccgccatagctgattgtgacataaccgcagcgagaccaatggccgccagcgctttagtaaatttgtgcatggtaaactccagctttaattcgctttcatgtagggaaaaatcggaattaacaatttaatcgtcatcaaaacaaggcattagaaaaatcgcattccccactgccgttgttagagtagtaatacccggaaattatttctccatacgagagcattatcacatcgcggaattacagtaattgcgtacatacatttagcaaaaaatgacataaaaaatgacacaattgtcatacaattttaccggggcatagcaggatcatctataccatcagcaggcttatccttgtgttgtcagaggatgtttaacggtgggttacagcactgttatcatcagcgattgacggcgttgctgcgggcgatcgcctgtgcgccactcaaatggcaacccacctcgcaccgctgagccacatggcccgcttaatatcgcgaaaaaacggatctttggcgtaatttattccgaatagaaaaaatatattcctcttgataaaagcgcctgcaacaaaaaataaaaataatgatcatcaacctgaaacattactaatgaaataacttattccgttctcttctacgacgaatctcgtagtcaaatacttatatcttataaccaatctgaaaccagcgagcccctgccaacggcgcacaatctcagccctggtagtttgcacaaataatggtgtaacaaaacgtaaattaccgcgcttgagagttttcttaatttcgttgagcgagtattcttaaatcgtcggcaaatggaaaaaatacccgactcatacggaatgtgtagagttttattattctgcaacagtgccgcgtgtcactattttatcttgtagttatccgcaggatccgctgacgcgcaccagtaaccccttcccggttaataaggatattttttatggcagttccaggaatggcacaaaagctaaacacccaaatgaatcttgagtttcacgcctctaacgtttacctgaacttaagcgagtggtgcgcccggcatcgcttcgacggcgccgcgacgtttctgcgcacccgcgcgcaaagcagcatcaccctcaccatgcgcgtatttgactacctgaaaaaagccggcagctggccgatcgtcaatcccgaccacgcctgtaaccctgagtgcacctcgctggaagatctgtttacccaaaccctgagcgattaccaacagcgcagtcgtctgctgagcggtctcgctcaggaagccaaagcgcaaagcgatgacagcacctggcggtttctcacgctgttggcggaagagcagcagcaggatggcctgctattgcaaagcgtgcttgaggaaattcgtaatgccgataaagccggtctcgggatggagcagaccgatcggcgtctgatggctatcgttggagaagcgcagaaagcgcattaatcaagcctttatcgctctgccagggggagcgcgtctgcgctgccccgcccggtttattaatccattacgtctattttttctcccctattattcctttcaagaataaaaaagttttaactcgatcccattccctcatcaccgttaccccataagggggattagtgagcgcggtcactttttgacgaaccataaagaaatataaaaacagtgtttcaaaaatataaaacacgaggtttattttttatggctagatacacggcttcagcctctgaagggctgcagggaagaccgatcttgttacgccatcagttagcctacggcggcggaaatctgttagggagcggcgcactggcgataagcggcgcatggctactctatttttatacgaccttttgcggcctgacgctgatcgaggcctcatttatcttctccgtcgccagcatcattgacgctatcagcaacccgctgatgggctatctgacggataattttggcaaaacgcgcctgggcaagcgcttcggccgccggcgtttctttctgctaattggtattccgctgatgatgttctacccgctgctgtgggtggaaggcctgagtttctggtactaccttagcacctatgtggtgtttgagatcatctacacctctatcatggtgccttatgaaacgctggcgacagagatgaccgatgatttctcactgcgttcaaaactgaccggctataaagctatctttggtaagctggccaacttcctcgcggcgtttattcccggccagttcattttgctgtatggcaaagattctgccacccctttcttcctcaccggtctgacctatggcgcgatcctgatcgtcgctatttcctgcctgtggttgtgcagctgggagcgtgagcgcggggaagaggtggaaaccagcgcgaaaaaaggactactgagcaccctgctgtcgctggcgaaagatatgcgttcgactttttatctacgcgtattccgcaaacatcttggtatgtacctgtgcggctttggcgcggaatggctgtttgcctccatcttcacctatttcgtgatcttcgttctacaacacgatccagcgatggtggccgggctgaacagcctgaactcgattctgcagctgatctctacggcgctgtttatcggcctgtgcgtgaaaaagggcttcagcaaaccctatatcctggcgctggggatcgtgattttcgcggttctgctgtatacctcgctgtggtttttccatctaccgtccggcctggcgacagtgctgatgttcggcattaccgtgctgttcggcctgggtaccggcggggtttactatataccctggaccgtttacaccttcctggccgatgtcgatgagatctacaccggacgccggcgggaagggatctatgccggcgccatgaccttctcaggaaaaattcttcgctcgattgtggtgttctcgatgggggcgatcctgagcttctacggtttccagtcaaaagcgcacagccaaccggaaagcgcggtgactgctatcgcagtggtattctgcgtcggggtgatcgcattagccctggccgccatcgtcttcagcaagcagatgaagctggaccggaaggcccatctggtggtgctgcaggaagtcgcgcggataaaagcgggcggcaaaattagcgatattgcgccggacgtgcgggttatcgtggaggatctggtcggccatcgctacgaagagtgctggggcaacagcaaattgttcaaagatgctgcccctgcgcctgcgcagaccgtcgtttcccattaaagaagaaggccccgccggtatccggcgaggcctggtattaatgcgtttcttcctgtggagtaaacttcagctcaatcaacgcgatcgctttttgcaccgcgcgaagggtcaccggatcggcagaggccggatggctggcgaagtcgatagctttcagctgagtggtcattttttcacgcacttccaccggcgcaatgacgtcaatgacatcgaggatctgtttgataaccagctggcaggcaaccacatcggaaaccagctcgtcgtgttcggtaagatgttgagacattaattactccttttttcaggagcgtaatagtaccctaaatcgttaacgataataaaacctgccgtcgcaggtttttttatctaccctactggctggcgggtcgtctcctgccgctttgcacaggatcacactcttgatggcagtgacaacatgaataccgcgatctcttcccgcgatgaacgtgctttttcagcgccggcgctgctggtggccggtgccttttttatggagtttctcgacgggacggtgatcgccaccgccctgcccgatatggcgagggattttggcgtcaccgcggtcgaactgaatatcggcatcagcgcctatctgattacccttgcggtcctgatcccggccagcggctggatcgccgatcgcttcggcgcccgggctatttttactctcgccctggcgatctttacccttgcctcggtcttctgcggcctctccaccgaggtgcatatctttgtcgccatgcgtatccttcagggagtcggcggcgcgctgatggtccccgttggtcgccttgcggtgctacgcaccacgccgaaacaccagctgatcaaggccatcgccaccctgacctggccggcgctggtggcccccattatcggcccgcctttgggcggctttataacccgctacgccagctggcactggatcttctttatcaatgtcccgctgggccttgccgccatcatcctttcgctgcgcattatccctgatattcgcgaaacggaacggcgctccttcgatctcagcggatttatcactacctcggtcgcgatggtcagtctggtgaccgcgatggagcggctcggcgatcgccagccgcagatctggccgacgctggctctcgccgcgcttggcttcggctgtctgttatattccattcgtcatttccgccgggcggcggcgcctatggttcgtctcgacgccctgcaggtgccgacgttccgggtgacaatgtacggcggctcgttgttccgggcctccatcagcgcggtgccttttctgctccccctactgttccaggtgggattcggtatggatccttttcattccggcctgctggtgctggcggtgtttgtcggtaatttaaccattaaacccgccaccacaccgctcattcgctggctgggctttcgtcggctactgctgatcaatggtgcgttgaacgtctgttcgctgctggcttgcgcgctgcttacgccgcagacgccggtctgggccatcatgctgatcctttatctcggcggggtgtttcgctcaatccagtttaccggtgtaagcacgctggcctttgccgatgtccccgccgcgcagatgagtgatgccaatacgctgttcagtaccgcgtcgcagctggcggtagggctggggatcacgctcggggcgattggcattcgcctgggcgagcaggtcggcgactggctgcatcttactgaactaccggggatcagcttccgcctgtcgtttgtgtttatcgccttgatctgtctggtagggatgatcgacagcctgcatctggccaaaacggccggcagcagcgtgtcggagaagaagaaatagaagaaaaaataaacgacggaagggccagcggcgctggccctgatgacggttaagcgacgatctggcgaacaaagtcttcgattgctttatcctggcagttttcgaagaagcactgctggaagcgtgggccggagactgcggttttcaccagctgcggatcgatggcgcgcagggtatcgaggtagttctcttttactactgctgctttgacctggttgaggatcccggcattgcgcacctgcggttctttgcgctccggcggatagccttcgccgttgcggccggtaaaggctttttcaaagataaaccgcacattcagttcggcgccccagccgaagcctttggcaaacggcagcgacagcgcattaccgttgttgatctgggcaaacaggaacgcatccgccggatcgatacagtagccgcagaccacgcccggatggatgttcagcgacatcagcgccccctgaccggtaccgcagccggtgaccacgaagtcaactgctttcgaattcagcagaatactggccatgatcccaagatggatgtaggtcagatgatgatcgttctcatcgctcatgccgacgttatagaccgggaatcctttttcgtcggcaaccgcgttaagctccttgaggatgatggcgtttttgttcgcctggctgttctccatcatcagtgcaatcttcatggtttactctcctgaatgttgtgcgggcctgcccgcagaatgtcattggcgttgactgcactctactaccttgaaaacaaactttcaaattttatgaaaagttgttttaaaatttacgcagtgcttcacactttcgcaggctccctttgtctgttgacctcagccctctgcatgctggcgtatccgcttcgtcctcccttaccacccgccggcgacaaaaccctgaccgcccaggcaataatgaataataaattaaaagcattctcatttattattaaactgccaatgcgtgttattcccattagcattttaaataaaacatttttaaatttactttttgcaaataattaaataacaaattatagtggcagccaataacatctattatttaattccaggagtgcaacgatgctgaaaacggacatgattgacaaactcaatgaacagatgaatcttgaactctattcttctcttctttatcagcagatgagcgcctggtgcagttaccacagttttgaaggcgccgcggccttcctgcgtcgccatgctcaggaagagatgacccatatgcagcgcctgttcgactatctaaccgacaccggcagcctgccgcggatcaacgctatcgcctccccgtttgccgaatatgcctcactcgacgagctgttccgccagacctacgagcatgagcagctgatcacgcaaaaaataaatgaactggcgcacgcggccatgaccagccaggattatccgacctttaatttcctgcagtggtatgttgctgaacagcatgaagaagagaaattatttaaatcggtgatcgataaactgaccctcgctgggaaaagcggcgaaggtctgtactttatcgataaagagctggctaccctcgacgcgcagaattaatcccccgcgccgcgacagtccgtgtcgcggccctcttaatgtcggcagatcttattttctgcggtagtaagaccttcctctctggcaataaatttgccttttttctctaaaaacgccaccaactgtgcggcgcttagattctctgctgaacaggtgtgaaaccgcgcctcttcgccaaagcggcggcgaatggcggcctccagcgaggcgaccgtccaggactcacccgaggcgagcatcatctgtaaaacttcatgaccatgaatagaagacataacccctcctgcaaaaaccgccagcttaggccagaccgtcaacccgcgccttgcgccagcgcaggctttcgccctcttattatgtaaacatttcattacacaacttgtaatcccgatttgacgaaagccgtaatatcccctactctgcgcggcataatttattgttatttgctgtagggatagcgaaaagcgtgaaaaaccgcactctgggcagtattttaatcgttgctggcaccaccatcggtgcaggaatgttggcaatgccattggccgccgcaggcgtcggctttaccgtcacgttgggtttacttttcaccctgtgggcattgatgtgctataccgcccttttgctgctggaagtctaccagcatgtccctgccgatatggggctcggttctctggcggcgcgctatctgggccgttatgggcagtgggttaccggattctgcatgctgttcctgctgtacgccctcacggcagcctatatcagtggcgccggtgaattactcgcttccagcctcaaccagtggctggactggcagctaccgccggccgcaggcgtactgatcttcaccctcctcggcggggcggtagtgtgcattggcaccgcgctggtggatctgttcaatcgcttcctgtttagcgccaaaatcgtcttcctggtgattatgctggccctgctgatgccgcacattcatcaggtgaacctgctgacgctgccggttgagcaaggcctggccctgtcggccattccggtgattttcacctcctttggttttcacggcagcgtcccgagcatcgtcagctatctggggggggatattcgcaaattgcgccgggtatttatcatcggcagctttattccgctggtggcctatattttctggcagctggcgacgctgggcagtatcgacgcctcggcctttaccgccctgctggcaaataacgctggtctgaacggcctgctggaggcgatccgcgaagtggtggcgtcaccgcatgtggagctggccgttcacctgtttgccgaccttgcgctggcgacgtcattcctcggcgtctcgctcggcctgtttgattatctggcggatatgtttcagcgtaaaaacagcgtcggcgggcgtctgcagagcgggataatcaccttcctgccgccgctggcgttcgccctgttctatccccgcggtttcgtcatggccctcggctacgccggggtggcattagccgtgctggcgctgataatgccggccctgctggtcatgaagagtcgccgagagcatccgcaggctacctggcgggtcgccggcggcgcaccgacgctatggctggttctgctgtgcgggatcggcatcgtggctattcagttcagcatcgctgccgggttgttgcccgcggtgggataaaaaaggggcctgctggccccttgttcatttcgctaagcaacactgcttatactttttaccgctgccgcatgggcagggatcgttgcgtccgactttcgcttcatttcttattggctgcggggcctccaccggctgcggattcgctatccagtactggtaaagcgccagcgccgccggcgtgatacgctcgatgctggcgataaattcatccgccgtcagattatccagcgcgctaaactgttcttcgctgccgtggagcgcgatagcgtccagctccggctggagttcagcgggcaacgtcgaccagtcgctcagcgccacgccgcgcagatagccaaagcaccactcctcaactatggtcagctcctgaccttccgcttcgcgggtgccgaacagcggttcgaactgatcgggataagactccagccgttcggcgatatcgctcatatgctgcagcgtcagattgacaaagcgatcgcgctcgcgatcgttggcccagcgcgggacattatccgccccgccccaaatcgccagcagccactgagcgggttcgatgtcggtcggcgcagagaggatcgccgtcagcaggccatccagttcagagacatccagaatggcgccttcggcggcgtatttcgccagagtgtcatccagccattccagttcgttttcgttcaaaggtccggtattcattcacaggctcgcatggtaaaaatcgggcctacagtagccgaattgccgacagaaagccacccggcgatacctattgcgccggtgtcaacgatacgcgatcaggccaggccgcgcagcgccgacgccacctcacgacaggcctcctcccctaacgaaagcaaaggacggggaagcgagtctggatcgcagagtccgagcatcgctgcggcgctggctatcactcgcaggctaccaccatagcgatcaaagcatcgccataggggggccagctgctcattcagtgccgcagtctgcgccacatcgccgctacgtatcgctcttaccagcgccagtgagcagcggggaaagagtccgccgcagaccgaataccaggcttcgcagccggcctgcaacccggcagtggcccacgcatcgccgctaacgccaagcgtaacgcgagagggaagatgctgacgcagggccgctacacgttcgctcgcctgtggcgcgggcaggccgggaattttaatcgaggcaatggccggcaaggcgcgatgcgcccctgcagctcatccgccagcattacgtgggtagtgcggggattgtcatacaggcaaaccggcaccgagacatgccggcaaacttcttcgtaaaaggcaaagatctcctccgcggaaagcggctgataggacatcatcggcagtaataacgcatccgcccctgcctcctgagcatcctccaccaggcgtagcacctcgttagtcgcaatggcgccgacgccgaccatcatcgggatcgaccccgcatgcgccttcgccacctgcaccactcgtctgcgctgctcacggctgagataagcgtagctgccggttgaacctaagatgcccagagagtcgactccggcatcggtaagacgggccagaatacgaataaacgctttttcatcaaaattttgctgatgcaaaggtgtcaaaggaaatgcgcaaagtccactgaacatgctgcctccggcaggctgggctgagagttcgtttgatagtagcaaggcgcgatcgttttgtcctgggacaaatgagaaattgactgtaaggcaagagttaaccgaaaaacgccgtggcgtcaggctggcgggaatggtatcagaaagcgaaagtacagaaacaaaaaaaccacccgtaggtggtttcacgacactgcttattgctttgattattctgtatttcccaatggtacccggagcgggacttgaacccgcacagcgcgaacgccgagggattttaaatcccttgtgtctaccgattccaccatccgggctcgggatataaagtggaggcgcgttccggagtcgaaccggactagacggatttgcaatccgctacataaccgctttgctaacgcgcctttaatactgaagcacccgcaactgccgatgctgttaatctggagcgggaaacgagactcgaactcgcgaccccgaccttggcaaggtcgtgctctaccaactgagctattcccgcatcatcaagttatttgctaatcacttgattttgttatcgtctggaagactgtgccgccgttcgatgcgttgcattctacttatctctcgcggtgagtcaacggtatttttcgcaactttgtatcgtttgctgaaaataacggcgaaacgatcactgatcaagcaaatcgccgcgcgccgcgttcaaatactgcagcatcgaccacagcgtcagcaccgccgccacgaggaaaagcgcgatcccggcccactccacccacggataaggacgccacagcatccataccagggcggtcatctgggcggtcgttttcactttgccaatccatgagaccgccacgctgctgcgtttccccagctccgccatccactcacgcagcgcggagataatgatctcacgggcaatcatggtcgccgccggtagcgtgacccaccaggtgtgatagtgttcggcaaccagcaccatggcgatagccaccatgactttatcggcaaccgggtcgaggaaggcgccaaaacgggtgctctgattccagcgacgagcgaggaaaccatcaaaccagtcggttaccgcggcaacaaagaagatcagcgcgcaggcaaacggcgcccagctaaagggcagataaaacgccagcacaaaaaacgggatcaggatgacgcgaaacagagtaagcaacgtagggatattaaattgcatagtgacgggtaactatctgttgtaagtaaaaattagccctatgttgctacagagcccctaatgtttcaacgagtagaagatcttttctgccagagcgtgagagatgcccggcactttagcaatttcttcgacgctggcctgctgtagcccctgcagcccacccatatacttcagcagcatctgacgacgcttcggccccaccccctcgatagtctcaagcgagctggtgctcttcactttcgcccgttttttgcgatgcccggagatcgcatgatcgtgcgattcatcgcgaatatgctggatcacatgcagggccggcgaatccggcggcaggctaaacccttccccttccggctcaaagaataacgtttccagacccgcttttcgatcgctacctttcgccacgcccagcagcagcggatgatgtttatcccaggggacgtccagttcagcaaacacggctttcgcctgggccagctgtcccttgccgccgtctatcaggatcacatccgggatcttgttgtcatcaatcgctttaccatagcgacggcgcaggacctgattcatcgccgcatagtcatcgccaggggtaatgccggtgatgttgtagcgccgatactccgcgcgcagtgggccattgctgtcaaacaccacacaggatgctacggtctgttcgcccatggtgtggctgatgtcaaaacactccattcgcttgacggccggcagctccagtacgctggccagcgcctgcaaacgctgatgaatggtcgattgctgagacaatttggtcgttaacgctgtcgcggcgttggtccgcgccagcttaagataacgcgctctgtcgccgcgcggcttagtctgcacattgattcgacgacccgccagctccgacagcgagtcggccagcagcgtcttatccccaaggttaaagtcgagcaaaatctcccccggcagcgtgcgcatttggctgccctgcaggtagaactggccgacaaaggtctccacgacctctcccagctcggtgccgcccggcactttcgggaagtagcttcggctgcccagcactttgccctgacggataaacagcacatgcacgcaggccatgccggcatcgaaggcgacgccgatcacgtcgaggtcgtcaccggtgttggagacaaactgtttctccgtcacgcggcggacggcctgaatctggtcgcggatgcgcgcggcctcttcgaactccaggttctggctcgccttctccatccgcgcgatgagctgggtcagcacctggtcatccttgccggcgagaaacagccgcacatactctacctgctgagcatactcttcttcgctgaccagcccggccacgcacggccccaggcagcgaccaatctgatactgcagacaggggcgggagcgattgcggtagacgctgttttcacactgacggatgggaaagattttctgcagcagcgccagggtctcgcgcacggcatagccgttgggaaaaggaccaaaatattcgcccttcgcatgtttggcgccgcgatgcatcgccagacgcggatgagtatcgccgctgagaaaaataaaaggatacgatttatcgtcgcgtaacagcacgttgtaacgtggctggtacagcttaatatagttgtgctcaagcagcagcgcttccgtctcggtgtgggtgacggtcacgtcgatttgcgcgatcagcgctaccagcgcttccgttttacgcgacgcaaggttgctgcggaagtagctactgagccgctttttcagatctttggctttgccaacatagatgacggttccgccagcatcatacatccgatacacaccgggctggctggtcaccgttttcaggaaagcttttgcgtcaaaaacatcactcactggcttgctaacgactccgcattacacaggccatggcgaattgccaggtgggtcagctcgacatcgccatgaatgtttaatttactgaacatccgatagcggtagctgttaaccgttttaggactcagatttagctgctctgagatctcattcaccttctgacctttggtgatcatcagcataatctgcaattcgcgttcagacaaactggcaaacggcgattctgtcttttcgggttcaatctgacttaacgccatttgctgggcaatatcggaggcaatatagcgctgcccggacgcgacgcagcggatggcattcaccacttcctgcggcgcggcgcctttactgagatagcctgccgcgcccgcctgcatgaccttggcaggtaaaggattctcggtatgcacggtcaacatgatcactttggtgcccgccacggagcgcgcgattttgcgcgtcgcttcaagaccaccgatcccaggcatgttcatgtccatcaggacgacatctgcggaattagcccggcaccacttgacggcgtcctcgccgcagcaggcttcgccagcgactttaatcccttttatatcttccagaatgcgtcgtatccctgcgcgcaccagttcgtggtcatcaacaagaagaacgttgatcaaaggaataatctccagaatgagggataacgctactgatactttatctcccacatattaccgggttttattgctattttaaaaggcaaaaaaatgccctcgcctcgatttggctctcatttatggcaatgtctgtgcacactaagtggaaagtcattgagaacagtcagttgcccggctcttattttttaacaatactcatacagaaggcacaaaaaacacaacagattacgtagcgcataaatacgaagcaaaatatgtaacaattattaacgagctaaatagatgggggaaattattggcttgccgacggctattacgtattatccgaagcatcaaaacattcacagctcagatgagagaacagaaattaagcacaccttttttttctgtcgcttgtggtatactgcgcggccttcacattgactagagcgcaatagcgcagcgagtaaacgaggatatcgatgagcacaccagatttttccactgcagaaaataagcaggaactggcgcaggaagtctcctgcctgaaagcgatgattacgctgatgctgcaggcgatgggccaggcggatgcggggcgcgtgattattaaaatggaaaagcagatttcacagatggaagatgaggctcaggccgccgtattctccagcaccgttaagcagattaaacaagcctatcggcagtaatcctgtgccggctgaaagtatcactgacagccggtatcacgtctgacacgcagaacggcaggcgcattcagattagcccagtcgccacggcgtagcaggcaatttgcgttttattcggcgcattaaatttccgctgcatattcttctgatggaaattcaccgtattttccgaaatcgagagaatcatcgccacctccgccgaagtctttccttccgccgtccatttgaggatttccagttcgcggcggctgaacttcatctccggcggcatcaccatctcatcttccagacgcagcagcgtcagcaagcttagttcagtcagcgttcgcagacgcagctcaagctcatcttcagggtaaccgcccggcagacgattgttcgcggagacagagagaaatccctgagcatggtttggcaacgtcaggcactgcgtcacgcccttttgcagaccatggtcacgcgccccgtcccacagtgccggcgcatcacgaaacaggctgtcgttccatggcagatggccacgcataaaattctccggccgtaacacaggatctatcgcgaaataattttctgcctgatagtgcgacatccatgcgcgggggtaagtcgactggaacgtaacgcgggggcgggtgaaaggcaccgggtggcgcacacaaagcgtgtagtaatcatattccagcgcttcggtttcacgttgcaggagattataaacctcctcgccggtggccatggactgaaattggtgcagcatatcccgccgccagctgaaaaaatcattgtccctcatagctgtgcaaataactcctgattgataatcattattataaatacagaaaactaacacataaatcttatttatatgtataaaatatcgtagctgtcgcatttattagtctgaaggcttgccattttcccgctcgccgcacagaaacatagcgcttttctcccatcatgttctacaccctgccaagggcgatgggaagcggtgtatacggccgtgggagtcaatagcgcaaagacatgtcgcgggggagttaccccgccgcgagagtgggctaaacgcggcggctcccgcgaagctgagccgccgcgctagcacaagctttactgcatcaggaatttttcaaggaactgacgggtacgcggctgctggggcgaagcgaacaacgcttttgcctcgccttgttcgacaatgcgtccctgatccataaatatcgcccgatcggctacgtcgcgggcgaaactcatttcatgggtcacgatcaccatggtgcgtttttcctgcgccagctgacggatggtgttgagcacctcccccaccaactcaggatcgagggccgaggtgggttcatcaaacaggatcacgtccggacgcatagccagcgcgcgggcaatagccactcgctgctgctgcccgccggagagacggcgcggatagctattctcttttccgctgagccccaccttcgccagcagttcgcgcgcccgcgccatggactcctgcttatcttcaccttttacgatgaccggcccttcaataatgttctccagcaccgtacggtggggaaacagattaaagttctggaagacaaagccgacgtgctggcgcagctggcgaatgagccctttctgcggcccgaggctgcgaccggcgtcgatcgtcacatcgccgacgcggatagtgccgctctccggttgctccagcaggttgatgctacgcagcagggtggttttgcccgagccgctggggccgatgatcgccaccacttcccctttctgtacctccaggtcgataccatggagcaccgtctggccatggaatttttttaccaggcttttcacttctatcgcactcatttcggatcacgctcctggcggttcagctggttttcaaaataattctgcagcgaggagagcactgtcgccattacccagtagatcagggaagccgccagatacatagtgaagacctccagggttcgcgaggtgattagctgcgcctgacggaacagctccggcacctggatcgttgccgccagcgaggtatcttttaccaggctgataaaactgttcgacagcggcggcaaagcgacccgcgccgcctggggtaaaatggcccgacgcatcgtctgccagggcgtcataccgatactggccgccgcttcccattgccctttatcaatcgaggcgatggccgcgcgcagcgtttccgccgcataggccgcagtattcaacgacaggccgatcatcgccgccgggatcgggtcaagctcaatgccgaactgcggcaagccgtagtagatcataaacagctgggcgataagcggcgtgccgcggaaaatggagatatacatgcgcgccagccattttaccggccagactggcgacatgcgcatcagcgccaggataaagcccagcaccaggccgaaaaacatcccgccaatgctcagctgcagcgtaaagacggcccctttcagcagaaaaggggcggaatcaatgaccagttggatactttcttgcatgctgtcgtttctgtattagaggtgaggatgataggcaaacagcgccggcgctccgccggtatggacgaacagtatcggcccttcatccttaaagcgcttctgcgtgatgccgtcgataagcccggccatcgctttgccggtatagaccgggtcgagcaaaataccttccagctgcgccagcagcttcacagcggccatcccatcttcgtttggcgtaccgtatcctggggcaaagtagtcatcccacagtataatttcagccttcgcctgtagctcgagactgttggccacggcctgctgcagcgccaccactttcggcaactggtcagcgaccgagcgcgacacggtcaccccaatcagttccgcctgcggcatcagctgttcaaggccgaccgccaatccggcatgggtgccggcgctgccggaggcgaccacgactgacgagatcgccaccgcgtcttcgcactgctggctgatttccagtgcgctttccacatagcctaacgcgccgagggcattggagccgccgaccggaataacatacggacgatacccctgcgcctcaatgcgggtcgccagctcatcgagctgggcggcgggatcggtcagggcatcacacatctcaacctgggtgttaaagagatccagcagcagacggttgccattgctcagatagttctccgcccgggtgccgatgggattttccagtagcgccacgcaatgcagtcccagtttcgcagcgactgccgccgtctgacgcacatggttagactggatcgcgccggcggtgattaaggtatccgcgccctcgcgcagcgcatcggcggcgagaaactccagcttacgcagtttgttgccccccatcgccagcggcgtcgtatcatcacgtttaataaaaatttcgcgcccaaggtgatcggacagacgcgggagatactccagcggcgtcggcgcgccgatcaattccaggcgcggaaagcgggttaagttttgcagtgacatggcccctcctgactcagttatgcttcattatgcacacagttacgcgctaaataaaaaaaggcgcttccaggagcgccttttttcaccgctgtccgttatttcgtcacgtcagcgccaaaccatttctcggacagcgccttcaggctgccatctttctgcatgtctgcaatcgcgccatctaccgctttcagcaggtcgtcgttgcctttacgcagcgcaacgccagcttcctgacgagagaaggcttcgccggttaccgccagcgtattgttggttttcttcaccagatccaacgccgccagacggtctaccagaatggcgtcaatacggcctacacgcagatcctggtatttggtgggatcgtcatcataggtacggacgtccacgccctgcacattctgacgcagccactcttcatagttagtgcccagtccgacgcccactttcttgcctttcagatccgccgcggttttaatcacgccttcgttacccttcttcaccagcgcctgcacgccggagacggtatatggggtagagaaatcgtatttcttcttacgttcgtcagagatagtgacctggttaatcaccacgtcgatacgcttggagtccagcgaggccagcataccgtcccacttggtcggtttgagatcggccttcacgccaagatgtttcgccagttcgttagcgaattccacttcaaacccggtcagcttgccgtcatccccctggaaactaaagggagggtaggtgccttcgaggcccacgcgtagggtgccgcgctctttaatctgattgagcaggttttccgccgcaaaagttttcacgctgacgccagccatcaaaacaacggccatcgcgcccatcatcgcctgacgacccagaagtgctaatttcatagataccccgaaggttaggattttcctgtagtgtaaggcgcttaatgccctgacaccaacatcgttacgctacatcttatgcaaatttattatatatgatccgctttagggtatagcgaaaatcagggctttcctcaccctttttgctggatatctcccatactgcaaaggtcagcctgttgacgtctggagcatggaagatgaaaaaccccaccttattgcaatgttttcactggtactaccccaccggcggcgagctgtggcctgaggtcgaagcgctggcgcccagcctgaatgaaatcggcatcaatatggtctggttgccacccgcctacaaaggcgcctcgggcggttactccgtcggctatgatacctacgatctctttgacctcggcgagtttgatcaaaaagggtctgtcgccaccaaatatggcgacaaagcgcagttgctggcggcgatcaacgccctgaaggagcacaatatcgccgtgctgctggatgtggtggttaaccataaaatgggcgctgatgaaaaagaggctctgcgcgttcagcgcgtcgatgagcaggatcgtacgcaaattgacgaggagatcattgagtgcgaggcatggacgcgctacaccttcccggtgcgcgccggacagtattcgcagtttgtctgggactacaaatgttttagcggcattgaccacatcgagaacccgacggaagacggtgtgtttaaaatcgtcaacgattacaccggcgaaggctggaatgaacaggtcgatgatgagctcggcaactttgactatctgatgggcgccaatatcgatttccgcaatcatgcagtgaccgaggagatcaaatactgggcgcgctgggtaatggagcagaccggctgcgacggttttcgtcttgacgcggtcaagcatatccccgcctggttttataaagcgtggatcgagcatgttcaggaggtggccccgcagccgctgtttattgtagcggaatactggtcccatgaagtggagaagctccagcagtatatcgacctggtcgagggcaaaacgatgctgtttgatgccccactgcagatgaaatttcatgaagcgtcgcgccagggccgcgattatgacatgagccagattttcagcgggacgctggtggaagccgaccctttccatgccgtcactctggtcaccaatcatgatacgcagccgctgcaggccctcgaggcgccggttgaaccctggttcaagcccctcgcctatgcgctgatcctgctgcgggagaatggcgtgccctcggtcttttatgccgatctcttcggcgcttcctatgaggataccggcggcgacggagagacctatgccattgagatgcccgttatcgaacaactccacgagctgatcgacgcccgtcagcgttttgcccatggcgtgcaaaccctttggttcgatcatcctaactgcatcgcctttagtcgtagcggtactgacgacgatccaggctgcgtggtgatcatgtccaatggcgatgagggcgaaaagacgctgacgctgggcgaaaactatggcaacaaacgctggcgggattttctcggtaaccgggaagagattgtcgaaaccgatggcgaaggctgcgcgacctttacatgtaacggggggagcgtgagcgtgtgggtgttagaggaggtattgtagtcctctgacgccgggcgggccagctatggcccgccaaaatctcagcgcgtggaggccggcgcgctgacgggccccgtcgctcgcgctttggcccacgccttctcgcactccggagtgagacgttcaacacgggacaacgtcatccgatcgtaggagatcgtgttgccctcgcgctcgacaggatagatgtccagggaagcggtcacgttgtagatctcactgtcacgattcatcagtttccccggctgcgcaatcacgcgctgccactggcggcagtcgaaggtgtccccttctttggtgacaatcaggctggcaatggcgtcaggactcatcatcgcgctctgcggccctttcgtttgccagaaacctgcaaggccagccggcgccggcgctttaacgacgtcctcataacgatcaacctgtacgcaaccggccagcgccaccaccatgccagcaaaaaataactttttcatcattcatcccacaagccgataaaaaagtattgtggcattaaagcgttaagccttccacccccaccgcaaagggataagcgagcaagccagcaaccgctaacgtgggtttcatttgaagtaaggaaattctgaaagtaaaagaatactgggcgcgtaaccatagcatctatgggcactttttgtttttaattcggtcacactaccggttcttgactttactttaagagttttcctggcaaattatatgcatagatgcggaatagtttaatggagctaatgggttctttctaaacctactattattatcgcccgcaaggactgcttcgcacagccagtgcgaagtgtatatcgttacgtgttgattgaggatgggtcatgtcaacgatgattatggatttgtgcagctatacccggttgggattgacgggatatctgaccagtcggggaattaaaaaacaggaaatcgttgaggtcaacagtgctgcggatctgcagaaacactgtacgtcgtgttgcccggcggtggtgtttctgaatgaagactgtttcgtgcatgatgatgaaagtaatggcattattcgccagatcattacgcaaaacccggcgacgctgtttgttatctttatgtcgctggcgaacatccattttgaccgctatttgcgggtacggaagaatctgctaatcagttcaaaatcgataaccccaaaagaccttgatgttattctggttaattatcttaaatacaaaaacaccagtgtagggcagttaactttaccgacattgtcactgagtaaaacagaatcaaatatgctgcaaatgtggatggccgggcatggtacttcgcaaatctcaacgcaaatgaacatcaaagcgaagacggtatcgtcgcataaaggcaatattaaaaagaaaatacaaacgcataataagcaggtgatttatcatatcgttcggctgaccgaaaacatcacctccggtattcaggtaaatatgcgctgaaacaaactggcggcgctcccgccagttcagttttacgagacctctttttccacgaaaatcccatccgggtggcctatttcattaaaaaaccagatccccagaggatagtcttccagtgaaaccagatacatcgttccttcactaaacgactcaatcgccagcactacccccgatcgacgtgggccaccgtcggtcttcaccgtgacacgatcgttcacctgcataatcatctcctctatattttcagccagtgtagaacaaaaccacgcaactcgcagcgtcgcggcacgtgactggcgcttttttagaccgactatacttagagaggcttgagcgacgctcagcgagggggtaatgatgaagcaccaattaacaggccagaccggggacgaccttgacgtcaacgtagatgccctgctggcggcaattaatgagatcagcgaaagcgaagtccatcgcacgctggacgacccgcagcgcgccagcattgatggccgcgggtcacatacctggcgtgagctggcggaggcattcgaactcgatattcacgatttcagcgccagtgaagccaaccgttagcggcaggcgaaaaaaatcccgactcgcaggagtcgggatcaaacttgctaatgcaagaagcacttgaaaattcgttacaccgggaaatccgatgcgttgaaacattatcctcaattattttgcatgacaagagatattcatgacgcaaaatattgagaatgttggcgcttgatgacttatcgggctgcaaggctgatgtgagaaggcttagccgcaaaccggtttcattcgatagcgcgatcgcctgcgatcactttaagataattctcattttgccaatcggcatcgaaacgttttactcacgctgcgctgcgaaaacagacctggttacgcccattttgcttggccagatagagtcgcccatcggccaccgactgcagcgcttcaaactgatactccccccgctcttcgctggcgctcacccctaacgaggcgctaacccgcagcgtcacgttgttatgcaaaaagacttcccgtccctggatacgctggcgcaatcgctccgccaccgccgccgcttcctgcagggtggtattcggcatcacgatacaaaactcttctccgcccactctgcccagcagatcgccctgccgaaccgcgctggacagcgtactggccaccatcgacagcaccctgtcccccgcctgatgaccatagcgatcgttgatgtgcttaaaatgatccagatcgagttggatcaccgccagcggccgtccgctgcgctggcagtcgctggctaccgccatcgcctgttcaaacagcgccccgcgattgagcaggcgggtcaaggcatcatgccatgcctgccactccagagaggtttgcagaacgctcatgttgcggaccatgcggcggatcaccagccaggagagcaacagcatcaaggtgaagaggacccacatcagggtcagggcgatggtgatggtgccaaagttcccgcggacgccttcccgcagagtgtggatccgcagcagcacgccgtcaaaattgcgcagtttggcccagctgatatagcgcgtcagcagacgcagccctccctggttatcatggacaaacgcgcggctcagcagctcctgctcgcgcggcgacagcagggtcaggacattccccggcgcggaagaagccagcaggttcaaatggctatcataaagttggtactctccctcttgtcccccctgcatggcgctaaccaaaaacgctttgatttcactgactgagaaatccatcgccagcacgccgcgccagtaaccggcaaaatccaacggtatcgaagcggtgaccacctgctcttccagctgcgggtcatcgtcaggaaaggtttgccagataacgcctcgccccggattatttcgctgggtctggcgggtaaaccacggagcgccgagggcttgggaatagtgcgttatcacctgcgactcatcccgcagcggcagggtcgaggtaaaaaagccgctacgagagatatactgcatccgctcggcgaaatcgcgatcgtgctgcgtcagatttagcagataacccagctcgagcgtcgccattagttcatcagccgccagcggatcgtccaccagcaggatagggttgtcgccagcgacgctgcccgagatgccaaacaccggcagcgtacgccgattcggtagcgccacccgccaggcctgctgatggcgctggctcagatagcgttggctggccttacgcaatacatcgatatcgagcggctgttcgagcgccgcctgcatcccatggcgaaaaaacatcattctgtcgatgttgaactgcaacagcccatccatttcatgagcgacgttagccagattattacgctggttggccacgtaggcctcttccaggacattgatttcacgccagatcagcagcgtggagaaaaacagcactgcgataaaacaagcgttaaccacatgcgccgggcgagccaggtggtagcacttttttaacttcaaccgcagtggcttatccatctttctctcgcagtacgttgcgcaaacctcgcggcgtcagcgccccggtctctgtcgatacccggggcgttttcagggtagaacacgcggcgccgttacgctgcgtttcgccatgctactttccagcgccacgcaggctgctcaccgccttaacgcccgccagcaccaccgcgccgatgataaaacccagcaccaggttggcgacgaccggcagcgtggaggccatcacaccacccaaccccgcgctccagtgctcaatggcatgatgcagcggcgcaataccgtgaacgacaatccccccgccgacgaggaacatggccagcgtcccgacgatggacaacaccttcatcaggcggggagcgacggccaggagccctttacccagccactgcgccagcgcactacgtttttccgccagccagtaacccatgtcgtccagcttgacgatcacccccaccaggccatacaccccgatagtgaccagaatcgcaatccccgagagaataaggatctggttaagcagcggagcttccgccacgatgccgagggtaatggcgacaatttccgcggacaaaataaaatcggtgcgaatcgcgccttttactttgtcacgctcaaaggccagcggatcgcgctccgccagcgcggcgagacgctgctgccgccgttcaggatcctctttgtgtttccgcgcttccagactgtgcagtaccttctccaccccttcgaaacagagaaacgcgccgcccagcatcaacaatggcgtaatcgcccaggggatgaaggcgctgatcaacaaagccagtggcacgaggatcactttgttaacgaacgaccctttcgccactccccagaccacgggcaactcgcgattcgcccgcacgccggtaacctgttgggcattgagagacaaatcgtcgcccagcacccccgccgtttttttcgccgctaccttgcccatcacggaaatatcgtccagcagcgtggcgatatcatcaagtaatgttaaaagactacttcctgccaaaatgattttccttctcttttcatcaatgtctccctcgagtatgcgttaaaaaacggccggtgcccaaggtacaattagtcaatataaatttaacaacctgacgcaaattaaccactcgccagcacgatagttttcacgtttactatatgtcccctttctatctctgcaccgtcgtgaggaagtatgtctacccgtcagcttttaccgctcatcggggcgctgtttgcgctgtatatcatctggggctctacctatttcgctatcgccgtcggggtcgccagctggccgccgctaatgatggccggcattcgttttctcgctgccggcgtgctgttgctagggtggctactggccaccggccataagctaccggcgcgtcgtccgctgcttaacgctgcgctgatcggcgtgttgctgcttgcggttggcaacggcttcgtgacgctggctgaacatcagcacgttccgtcagggatcgcggcggtgatggtcgccaccgtaccgctgttcaccttatgcttcagccgctttttcggcatcgccacccgtaaactggagtggctgggcattgccattggccttgcgggtatcgtgatgctcaacagcggaggcaacctgaacggcaacccctggggcgcactgctgatcctgattggttccctaagctgggccttcggctcggtttacggttcgcgaatcgtactgccgaccggcatgatggcgggggcaatcgagatgctcgccgccgggatcgtcctgctggtggcctcatggctgagcgatgaaaccttaacccgcgtcccttcctggtccgggatcgccgccctggcctatctggccatctttggctcgctgatcgccattaacgcctacatgtttttaatccgcaatgtcaccccggcggttgccaccagctacgcctatgttaatccggtggtcgcggtgctcctcggtactgggttcggcggcgagagcctgtcgctcattgagtggctggcgctggcggtgattattttcgccgtagtgctggtgacgctggggaaatatctcttcccagtccgcagcgaggctactccttgtaaggcgtcgaagtagtcgtcagttcgcggatcccctgcgtatcgatctgcgcgtcgtgtccggcgccgcagatccactcttccagacgctcggtgagcgccgcatcactcagcctaaggcgcccgcgcagggcgcattcccagatgattaatacccgccagccctcttcggccagcttttgccggtcgcgggcgtcgcgcgccacgttaccagcgattttgtccagccagaatgccgtgcgggtggccggcaccttaaacagatagcagtcatggtgatgccagaaacagccgtgagtaaagataacgcaacggtagtcgggtaaagtgaaatcgggacgtcccggcagcgcgcgatcctgggcaacaaaggtgaatcccgccccggtcagcagcgccgctatccgcttttcgatcgccgtatcgcgcgtggcgatcgcccgcatatttttactgcgcgtcgctttatcgtgaacatccgccatcattatcatccgcttcgcggcgcgccaccgcctgagcgatgcgcggcgccaggagtttcgccaccgcggcgaagaccggaaccaccaccgagttgccaaactgacgataggcctgcgtatccgataccgggatgcgaaaacgcgccccctgcggggattcaaagcccatcagccgggcgcattcgcgcggcgtcaaccggcgaggccgccgctgttgattcagcggatcgtcaaaatgcttctcaccgagcggccggtcccagccgcgatcgacgagaatttcggcaccatctttatagtagcgggcagaaagcgtccgggccacgctgtggggattggcggggtcaaccaggccataaccaaagccattgccccgcgcctgatgcttgcgggcataacgataaagatatttccacagcaccggcgtaagaataaatttcgaatcgaccgtcggctccagtagctcgccaaatgttggccgcaccgccgggtactgcgccgcgatgtcgcgcagcgtaaatccagcatgcagctgcagatcgcgacggaaacccaccagcacgatgcgctcccggtgttgaggcaagaaatggcgcccgtcaatcaccttcgggtcatccggcccggtatgccccgcgtcagctacttcatatcccagctcatccagcgtctgcatgatgatacggaaggtgcgcccctgatcgtggcttttgaggtttttgacattctccagcacaaaaatcgctggctgacgagccgcgataattctcaccacgtcaaaaaacagcgttccctgggtttcgcaggcaaagccatgcgcacggcccatcgcatttttcttagagacgccggcaagcgagaaaggctggcaggggaagccagccagcagcacatcatgctgagggatagattcgcgaatatgccgcgccgcctcctcgtcgctaacgtcagagcgttggctgagggtaatatcgcggatatcttcattaaaacggtgctgctgcggatcacagtaccagttggccttataggtgcgtaccgcgtgcttgttccactcgctggtgaaaacgcactgtccgccgatggcttcaaaaccactgcggatcccgccaataccggcaaacagatcgataaaacggaacccatagtgcggatgatgggccggcggcgaaggcaggagcgtcgccagatgagcaacttcctgcgggcgcaaacgctccgccgcgcggccaagcgccgccacgcgcttgaggatcgccgcgctccagtgctgttcgccgacgctcaccagttcggcaaccagcgtttttacatcgtagatcgtcatcagctgacgcagcagcgcctcagcgtgttccccggcctgttcagccaacgacaacgacctgtgttccttgcttaacttttgcggcatatcctcaaccaacgcggacgattttggcagagagtaccataaatcaccggtcggttgacgcctgcggtgcaaagcggcgcaaaaccgcttcatccagcgccagcggctccccctgcagctccgcgctgagcttagccataaattcgacgagaaaacgggcattatgctgcgccatcgctttccccttgtcagtttgcatggtttccggcaggcgcagaagtttgcactggaaatggtcgagggcatatttgcggtcatccagcgcccgccgatcagcaaaaggatcttcggcatcaaacaagatggtattcagagcgccggcgacagcgaagaccctcgccagaccaatggctcccagcgactcgagtcgatcggcatcctgaactattttcgcctccagcgtgcgcggtgggatcgccgcgctgaagctgtgcgcctcgatggcatggctgaccgccgggtaacgatccgcaggaaaatcagcaaaggccgactgcagaatggcgagggttttctcggcggccatcatcgaggatcgacttcgctccggatgattttttggcaagctgacgatgtcatgaaaatagcaggccgtaaggagtaccagccggtcgacttcctcccccgcggccagctgagtggcggtcgcccagacgcgacgaaaatgggacagatcgtgtgcggcgtcatcctgcgcatggtgcgtcagtatccagcgctcaaatcgttgctgccagtcaaccaggtccataggctttcctttatctgagggtcagcctcgagcatagcaattttagcgctgatgatcctgctcgccgcgggatggacgcgtataccagacgaccgcgccgagaatagagccaatgccgccgaggaccagcatacccaacagggcgccaagccatttcccggccgttgttccaaaatcaccctccacgctggcgccgggaacgctgtgaatttttcccactacccaccagtaacgcacaatgacccagacacaatatccgcaaaaagcatacaacgcccagagcgcaagtttccctcccgggctgcgttttgcctgctcttccatctcattcctctccgtgacacaacagactattgtcactcaaaacgtgacacgcatcacattataccgctaacctgcgtcacaggcagcagtttcatcttcgtcttctgcgccttctcgcgacttatgctgccaatgcgcacaggctgaagagatgtccttattatctcccgtacgctgaaagctattcattccttaaatatcgcaagctgggttgataattccctggatatttacattcacaaaaaataaatttccataatgaataatgcgtatgattattatttgcacaatttatttcataaaattaacaacgaccaaccaaagatagaataaagtattgctatataagaaaataataaattttgcacaaacatccaaatttaatataaagaaccacttagaaatattttgaaatgtttaacattatttatttacatattttattttaaataaagatgaacttagtcgttagtatcggatagtcattccggagggattgtcataattcatagtaattattattaaaagggaatatataatgaaaagaaaagtactggcactcatggttccggcattattaatggctagcgccgctaatgccgccgaaatctataacaaaaacggtaataaactggacctctacgggaaagttgacggcctgcattacttctctgacgacgcttcagaggacggcgaccagacctatgttcgctttggtctgaaaggcgaaacgcagattacttccgagttaaccggctacggtcagtgggaatacaacattcaggcgaacaccagcgaaaaagaaggcgcgaattcctggacccgtctcggctttgccagcctgaagtttgccgactgcgggtcgctggactatggccgtaactacggcgtggtctacgacattgaatcctggaccgatatgctgccggaattcggcggcgatacctacacccagaccgacgtttacatgaccggccgtactaacggcgtggccacctaccgtaacagcgatttcttcggcctcgtcgacggcctgcatttcgccctgcagtatcagggtaataatgaaaacgccggttctggcgaaggcactaataacggtgggaaacgtaagctggcgcgggaaaatggcgacggttttggtatctccagctactacgatctcgatatgggcatcagcttcggggcagcgtattcgtcttctgaccgtacccataaccagctggcggccgcgcgtagcagccagcgttatgccaacggcgataaagccgatgcctggaccgtcggcgcgaaatatgacgccaataacatctatctggccgccatgtatgctgagacccgcaacatgaccttctatggcaacgatagttttggcggaattgccaacaaaacgcagaacttcgaagtggtcgcgcagtatcagttcgacgactttaatttaccgctgcgtccgtcggtggcctatctgcagtcgaagggtaaagatctctacgcctattctcgctacggcgacaaggatctggtcaagtatgtcgacgtgggcatgacctactacttcaacaaaaatatgtccacctatgtggattataaaatcaacctgctggatgaagacgaccgcttctacaaaaacagtggtatcgcgaccgatgatatcgtcgccctcggcctggtctatcagttctgatccccgtcaaagcccgcgttcagcgggcttttttatgttcccgctccgttgagatcactcttttcgacattgccgctttccaggcgtaccttccctctttatgatgcgtttaagctcgttcgggctaaaagcggcgataaggtgccaaaaggataaagcgcgctaccgcgactctacgctgaaaccaggacgatgatgatggtgataccccagcgcaggcgttatacctgaagctaacggtgttattgaagggaaggttagagcaagaaaagtggcggagagagggggatttgaacccccggtagagttgcccctactccggttttcgagaccggtccgttcagccgctccggcatctctccgctgtgatggttgctataatgccaggatctttggcattttaatagctcccgtttcggtaattgtgttcaagtgacgactttgcgagcaatatgatgtttaaatggccctggaaagcagatgatgagtccggcaacgcagagatgccctgggagcaagcgcttgccattccggttttagcccatctttcgtccactgagcagcacaagctcacgcagatggctgcccgttttttacagcaaaagcggctggtggcattgcaggggctggagttgaccccgctgcatcaggcgcgcattgctatgctcttttgtctgccggtgcttgagctgggcattgagtggctggatggcttccatgaagtgctgatctaccctgcccctttcatcgtcgatgatgaatgggaggatgatattggtctggtccacaaccagcgggtggtacagtcgggacaaagctggcaacagggtcctgtagtgctgaactggctggatattcaagactcttttgatgcgtcaggctttaaccttgtggtgcatgaagtggcgcataagcttgatacgcggaacggcgaccgggccagcggcgtgccgcttatcccgttgcgtgaagttgccggctgggagcatgatctccacgccgcgatgaacaacattcaggatgagatcgatctggtcggcgaaagcgccgccagtattgacgcctatgccgccaccgatcccgcagagtgctttgctgtcctctcggaatattttttcagtgcgcctgaactgttcgcgcctcgcttcccggccctgtggcagcgtttttgccacttttaccgccaggatccgctggcgcgtagacgtgagaatggcctgcaggacgaaggcgatcggcgcattgttcactaaaacaacgtgttgagctaaatttagccatttgaatcagcaggttaattttagtgttgacacaaaaatgcgaggccagtagtatgcgcctcgttcacacgattcctctgtagttcagtcggtagaacggcggactgttaatccgtatgtcactggttcgagtccagtcagaggagccaaatttaaaaatcccgctcagggaaacctgagcgggatttttgctttccgtgatcctctccgctccccaagcatgcaatcttatcctggtgtaggtgctattttcttgctatgaggcaagctgaacggccgtgagccccacgctcccgcaaaggcttaaataaaggcggtttaaccgtgccggaccatacctgggtgtaaggcaatcatgcgcggttccaaaaaagatcggcaacaccgccgcttctgacatctctccgccagcgggtataagcagcatcgtaccgtaggtaccgtccaaggttccgtatgtgatccccgcaggtgaaaatcagcgatgctgctcccaaccttatggctacagactttcgatccggcggtaaccgctgggtctgccgctgcgtagcagacatggaggatgctgaaaacagcctgtccagtgcggcgatgacgcccaggggacggctacgggtggatgtaccgagtccgctggcccgccttattctggtgccggcgctaccggctttccacgaccgctaccctgatatccagatcgacatgggtgtgagcgaccgggtagtggctctgatcggcgacaacgtggattgcgttctgcgcggaggtcaaatcaccgaccagtccctaatcgcacgccatgtcggcgatttgcaaatcggcgtctacgtcgcccccagctatgtggaacgccttggcgctcccgcacacccgcgcgagctgcaaaatactgaccattgcatagtgggattcttgtcctcacgcaccagtaagattgatcctttggtactgtgcagtgagaatgaacgtattgaaatcacgggcaactacgtacttgccgtggatgatggcaatgcttacctcgaagctgggttagttggcttaggcgtgattgcgctgcccaactatatggcggcagcgcatcaggccgttggcgctttgattccattatttacacaatggcggattagcccaatgcctctgtacctggcgtttccaccgaaccgccatgtcaacgccaagctgcgcgtttttattgactggatcgttgaattgatggagcagcatgtccccattgccaacaatcagtgacgccatcccctgattcgcttatcagcggcgatggggttcagcggtagtgactgtggtcaggcgtgttttgacaatagggattcagcagaactcatccgtcttatattctggataatggctatcataaaggggatcttcgctttcatggacaatggcagccaaaaaaaagatcctcagtaacaatattaagtccatagatatatttgcagactttatcatcccctcctgagcatctcctggcgccctcattaaaacgccatcaccgccactgctgataagttaaggatcggtttcccgatccttattcccaacaacgttgaatgcatcgacagcaaaagagccttcttacaatagccgttaatcagactaaacgacccgctacaaacttccctgcgccgctgtggcgctgatattcaccggcatgccggagcggcgctgcagggtctgctcgacctgggcagggctcactcccggcccctgggtaaagtcgcgcagcgccgaggtcatcggcaaggggacttttctgtcggattcaaactccgcgcggttgcgcgacagcggctcgtgcacctccagccagtgactgccgtccggctccacgctgtacttcaccggctgatcgatcagctgaacccgcgtcccaaccggcacgttatcaaacaggaatttaatatcgtcattgcgcaggcggatgcatccctggctgacgcgcagcccgataccaaagttggcattggtgccgtggatggcgtagagcctgccgatgtagatcgcatacagccccatcggattatcgggcccggggggcaccatcgccggcagcgttttgccctctttcgcatactcgcggcgggtattggcggttggcacccaggtggggccttcctgcttacgctctactgccgtcacccagttacgcggcgtttcgcgtcccgcctggccaatgccgattggcaggacttccacgctgttgcccagcggcgggtaataatagagacgcatttcggcgacgttgatcacgatcccttcgcgcacggtgtcgggcaggatcagctgttgcggaatagtcagcgtagaaccggagcgtggtaaatagacatcgaccccggggttggcttccagcatattgcttaacccctggccgtactgggcggcaaaactttccagcggctgggtgttattgtccggaacggcaatggtaaatgcgctgcccaccagacggctcccctccggcggcagcggatagctgatggccagcgcgccgtggctggcaagcagcatcagcgccgtacagagtaatttcacacgccgcatcgtcattttcccttcctcagtcgcgactcacgtgtgtgaattatagcgttatttccactccccgacccgctggccagcatttccttaaatctgatagtcgattgcgacctcttccggctccatcgcctgacgcttaatctcatccagcgacagtccggcattgcacaattcgataaagcgccaaacgtaattccgctgcagctggccccgcttcagtcccaaccacacggtattggcatcgaacagatggcgggtatcaagacgcgtaaaggtgtccgcttcccgggcatcaccggactgctcggcgaccagcccgacgcccagccccagctccacgtaggtcttgatcacatcggaatcctgcgcgctcagcacgatatccggcatcaaccccttgcggttgaacgcctcatcaatgcgcgaacggccagtgatcccctggcggtaggtgattaacggccagcgggcgatcgcctccagcgtcaggggagaaacctgcgtcaaaggatgctccttcggcaccagcaggctgtgatgccagcggaaccaggggaaagccgccagcgtcggatcgttgctcaggcgctcgctggcgatgccgatatccgctccgccgttatgcagcagcgcttcgatttcctgcggggtaccctgcaccagctcgacgcgaacatctgagaacagctcgcggaaagctttaatgaccggcggcaggctgtagcgcgcctgagtatgggtggtggcgatagttaagacgcctgacgcatcgttagtgaagagatccgccagccgccgaacgttactggcttcattgaggatccgctcggcaatcgataacagcgctttacccggctcggtcatgcctaacaggcgtttgccgcggcggataaagatctcaatccccagctcctcttccagttcccggatatggcgactgacgcctgactgcgaggtatagagcatattcgcgacttccgtcaggttgtaatcctgacgggccgcctcacggataattttcagctgctggaagttcaccctttcctccgggccaatggacttaacgtatctgctattgttaaagtctgttgtcccaggtaacaaataataaaaaccagcaacttattccttaagagaatataccctaactgaccagctgcagttcacggttttccagcgatgggcggctcaccagagacagcaggatctctttcaccgcctgcgcctgcggcgacagactgccgcgagccgacatgttcagcgacagcgacaggctcattgaaggcgtgctgatccgcgccatccagccgttcgccgccccgcacagggaacgggcagcggattccggtaacaccgtcgcccccatgccgctggcgatggccgcggtcagggtggtaatggattcgatctcgccgataattttcgccgatagacgacgcagggtgaatgcctcagtgacccgcgcccgcactgcgctgtaatcgcgcggcaggaacaggttcatctccgccaccgccgtgagatccacgctctgccccgggcagtcgcgggtgccgaccaggtaaaggtcttctttcagcagcggctggctgacgatgcctgccaccggcgaacgctcatagagcaccgccatatccagctggcccgccagcagcttgtcattcagcgctgtgccgctgctctcctgcagatagaccatcacctcaggcaactcattgcgcaccgtttgcagcaacggcatggtaatggcggaggccgcggtgcccggcgccaggccgatcgacacctggcctcgcagcgtctggccgacgttattgaccgccagctgcgcctgctcgcactggcgcaggatagtgcgcgcatgggtgtagagaattttaccggcttccgttggcgtgacccctcgcttggtgcgtatcagcaactgctggtccatttcaccttccagggtcgcgacctgttggctgagggccggttgggcgatatgcaagacttcagcggcctgggtcagactgccgatatcgacgattttcacaaaatatttcagtcgtcttaagttcattttgcctcctgtaaggaacgccagcgtcaacgctgggagtatgatgcactggcttttgcaatttgcttgccagctttgcatttcctcggctgtcgcccgccgcaggcagtgttataagggatagtgatagcaattcggtttttatttgcccggtaagcagattgtggtatgccccattaggggtacattcgcactacaacggtgcaacatggtgaaaaaaacagcgcatgggtggcgattgctgaaattgtcagcagtcgaacgcaattctttgaatcaggctttgacaaggccggatggcatcgttaatatgcgccccgttcacacgattcctctgtagttcagtcggtagaacggcggactgttaatccgtatgtcactggttcgagtccagtcagaggagccaaatttaaaaagcctgctttcgagcaggctttttgcttttcagcgccggtacttctgccggaaggcgaatggccaccctccggcgattgcggctttagcgtaaactctcttccttcagatctatctcccgcagcacctcataaaaagtgatatcgctgatgttatgggcgcggcgcagccggaacagctcctgacgctgggcgataatgacctctcgttgcatatatttctccagcctggcgcgcttagccagctccagcccgacatcctgcccctcgtcattgtcgttatagtgaagccgccgctgataggtttcgagcagcatattgccggcatcggcccgcagggcctgctcactgggatcctccaccggctcgtccagtagcgcgttaagacggttaatggccacctcggtcatcacggcgccaatgtcgtccttaccggtgtcatgcggtagatcatcggcaagataacgagtcataaacggcagaccgatagccgccaccaccagcgacatcaggatcaccgccatcgaaagaaagatcagtagttcacggcccgggaacggcgaaccatctgccagcaccaccggcagcgtcagaataccggcgagggtcacagagcccttcactcccgccagcgccatgacggcgaggatactgaatcgtggacggacggtgatggccttgccccgacgtttacggcgaaaaattgtcagcttcatcgacagccatacccaggcgaagcgcatcagaccgagcgccagggtgatggccacggcgtacagcagcagataccagggcgaagagacgccggcctggctggctaccgccggcagcgtcctgagcatgcgcggcagctgctcgcccagcatcagaaagatcatcccgttgagggtggtctgcagcatggaccataccgcgctgcttttcatgcgcgtcgccggaagccggggccccgacagctgctcataatgcatcgcaatgccggcggcgacggcggcaagaatgcccgagacatggaacgcctcggccagcaggtaggcggcgaaagggataagcaggctgatcaggatctggatggctggctcctcgcgggtgcgccgaaccagaaagttattacatttgccggtgacccacaccaccacgaggccactgaggatgcccccgaaggccatcaggaaaaatttcaccaccgcgtctcccggggagaagctgccggtcagcaccgcggcgatggcgaagttaaaggcgacgagccctgaagcatcgtttaacaacgactccccttcgagaatatgcgccatccttgagggaagcggcgagctggcggtcattgccgataccgccaccggatcggtaggcgacagaatagccgcgagggcgaaccctgccgccacggtgatagccgggatcagccagtgaataaacaggccaataccgagaatagtcaccatcaccaggcctatcgccagcgataaaatcggcttcatatcgcggaaaaaagcgtctttggggatgcgccagccatcgaggaacagcagcggcgggataaacagcagtaaaaaaatatgcgggtcaaaatcgacctgaaagccactggcggccagcgcggcgcccgcggcgatttggatcagcggtagcggcactttaacgggcagaagatgggacaggaacacggtcaccacgatggccatgataaagaccagcacgatagcaattagcgacattcatcccctcctctgacggcaatattcattctgtacatcagactgttaatcctttttcgcaggtgttgtttcggtaacagattatttacccagtcaccgataattaatgacagacgtcattgtctgccggcgataatatttaaactgaggtggcaaccggtgccggatcaggggtgacaatgtcttttatcaagccgcgtttgtcaatccgctatcgtctgcaaatcatcgccggccggcattccggggagaagtcctcacgggactgtcgaccgggtacttcgcaaattggcctcttcacatggacaaaaccactcaaccgctccagccccccgctgtttatatattcccaatattattaattcgtattatgcattgtgaatatggatattaatgaccagtctaatatacccggcagagttatatttcgtgcccccgccggcagtgcgaaccacgtatttgcgataaataattcttaacgccccccagttcaggatgattggtcagccagccttacgctacgcgcaatgcttgccctacccctaaattgggcgtaccctgaccaacaattaaaccacacggtctaaatcatgaatcccgatacctccgccgtcctgaagccccgccgcggccgtccacccaaggtcgatcgccagtttgacgatacgcgtcaggcgctgattcgctcaggccttgaagtgctgaccgaaacgggctatctcgcggcgggtattgatgcggtgatcaagaatatcgccgtgccaaaggggtcgttttatcattgctttaaaagcaaagaggcttttggcctcgccgtgcttgccgcctatggcgacttctttgcgcataaattagataaattcctgctggacgacgccgtgccgccgctggaacgaatggcggcctttgtgcgtcatgccggtcagggaatggagaaattccagtttcgccgcggctgcctggtgggcaacctgctgcaggaagccccgttgttacccgagacgtttccccaacggttgatggctatcctggcggcatgggagtcgcgcgtggcgcgctgcctgcgcgaagcgcaggcagccggggccatcgccagcgacgcctcaccgcaggcgctggcccaggtgttctggatcggctgggaaggcgcggtgatgcgcgccaggctggtccagtctgccgcaccgcttaaccagtactgggatttttttgcgcacagtatgacaacaaaaacacctgcacaggacggcgctagcgccgataacccccttccgacgaggaatactctgtcatgaaagcattagttctggaccagatcgacaaccgcaccgtcgccaccgtcaaagatatcgacctgcccgctcttgccgaaggcgacgtccgggtcgccatcgactggtcgagtctcaattataaagacgctctggcgatcaccggcaaaggcaaaattatccgtcagtttccgatggtgccgggcattgattttgccggtcaggtgaaagaaagccgcgatccgcgctttgttcccggccaggccgtgatcctcaccggctggggcgtgggcgaaaaccactggggtggcctggccaccgaagcctgcgttaaaggcgactggctggttgctctgccggagacgctcagcgcgcgccaggcaatgatcatcggcaccgccggctttaccgcgatgctatgcgttgatgctctcgttagtgcgggtgtcacccctgacagcggggatatcctggtcaccggcgccagcggcggggtcggcagcaccgccgtggtgttgctcaaagcccttggctaccgggtgacggccgtatcgggccgggaatcgacacacgattaccttcgccagctgggcgccgatacgatcctgccgcgcagcgacttcgcggagacccgtccgctggagaaacagctgtgggcgggcgcggtggataccgttggcggcccggtgttggccaaagtgctggcgcaaacgcaatatcgcggctgcgtcgccgcctgcggtctggccgggggcttcgatctgccgaccaccgtgatgccgtttattctgcgcaatgtgcgtctgcagggggtggattcggtgatggtgccgaccgctgaacgcgacgctgtctggcagcgtctggcccagcttctgccggagagctactaccagcaggcggccacagaaatcacgctggagcaggcgccagcgtatgccgcagatttcctcagcaataatattcatggtcggacgctggtcaatatcggccagtaatcctcttctcccggcgcccgtgcggcgccggatcccgagagggatcaaggcatatcatttccttccccacgggattatgatgacgcgaacgaatagctctgcgagtggtaaaaaaagtaaatggatgtcataagcatcattatggcggcgggcaagtcgtccgttgacgtcgcgctgtatacgctgttgccgatcatggtgatcatgctgatcatcatgaaataccttgaggtccgcggtatcctcgatgtgattgttcgctgggtggcccctctgctgaagcccttcggcttaaccgggatgagcgccttcgccctgatccagattaactttgtcagctttgccgccccgctcgccacgctgtcgattatggataaacgcggcgtctcggaccgacaaatggccgccacgctggccatggtgttcgccatggggcaaggcaacgtcttctatcctcttaccccttttggtctgcactggctggcctcgatcgttatctcggtggtcggcggcctgtgcgcggccgccgtcgcctggcacgtcaccggacggcgcttatcggtcgccgagaacccccgcgcggaagcgctgccgaacgccgagcagaacagccagggaattctggccgtgattaatagcgccggctccgacgccatccgcctggcgctcggcgcggtgccaatgctgatcctgtcgttaaccatcgtcgggctgctgcagggcgccggggctatcgacctgctgcagcagctgctgaagccgcttctcagctggctgcacatcccgcagaactttgtgctgccggcgctggtgaagtgcgttgccgggggcaccgcctactttggcgtcatttccgagctgatccagcagggcaaagtcaccgtggaccaggtcaacgcctcggcaggtctactgatccagacctttgatcttcccggtatcggcatttttcttggcatcagctcacggtttgtccgcctgttccgcttcgtggctcccgcggcgatcgtcggcatcctgctgcgtaccgttctgcacctgatcctgttttaacgcctctgctctggcctgcgctttcaggcaggccgccaccgccgcctgttcgccgcaggcgatgcgctcatcgacgcgcgtcatcatccatggaaagaatggattggaggtgacgcgcattaacgtctccagccccacgctcagcgtcccggtctctccgcgcagtgaaatggtgcccaggctaatgccgtagcggttcttctcgtccggctcgcgaccatacagcgagtcgctcaggggaaacggcaccgccacatgcgacaaagagtacatatccgccggccaggccaggtgtaaaggataacgatgctcttcccgttcctgggccagcgtggtccgggcgacggtctgcagcgtgtgcgccgtcgcgttggtcaccaccgtggtggtataggcccgcggcgccgggggcagcagcgtattcaccgccgcatagagcgcagggcgaaacaggccccggagatccgccgcctggttaatatcgaacaccaccagctcgctgccgttatccggcagatagcgatacagggactccaccaccgcgcgggtgctgaccgtggaatccatcaccgactgaaaggtgaggatcggcggcagcgctttcagctcgccctgccgggccgcgcggataatctgctgctgcagcgcctggctcaataaccacgattgtctcgccgccttgaccggaaaggagttgtacttgaacggattaaactcaggcgccacgttcagccaggccgcgcgggcgaacgccgggaagacggacggtagcccggcgaggccggcgaaacgggcaaacgcggtcacgccgatcatcggcgacagcagaatgatctgctgcggctggcgcaagtgattgtcttccaggctatcgagggcatacttgagcgccagcgcgccgccgttagagtagccgaccagatgcagcggcacgtccgccccggcaaggcgggtcgcttcgcgtaccgccagacgcgtcgccgccagccaggtctcccagtcaaccgccgttaacgcccccggcgcggtgccgtgtcccggcaaacgcggcgccaccgccacataaccccgctgctgccagagttgcgccagatagcgcacgctgtagggcgaatcggtcaggccatggaggagcaccacgctgccgcgcggcttgcccagcggcatcagcacaaaagaacggttccagtcctgcttaaactgccccggccagacccggctgtgacgataaaagcggttgaccggggttttatcttcctccggcaaagcctctgtcacctcacgctggagatcggcgaaaatcgtcttctcccgcgccagatactgggcaaaggtcgcctggtcgatctcttcggccgacatctcgttgccactccaggtatgccagcgatgcagggccgggccgcgctgggactcatagatccgcccggcgagaaagaccaccagcagcgccagtaccgcaatgctcccttttttcagcagtgagccgataacggcgccggacgttcgccagtgtcgaaatagatgcttcatgacgctctctcttatatttattgcgtagccggacttatcagccctcttcctgacaggctattctcacggtctgcttttcagcatagtcatcgcttcctgcaaattaaacccggcagatcattgccccccggcataaaaaaacctagcgcacagatcaacaatcggttgcgtatttttaaacactgcataaaccaaggggataatcttattgtcagatttttaagaaacatgaattatcgacgcacatgtcgctatgagaggataaaaaacagatggagtggtgggtaaaaaaagtacaggacaacgcttcggccagcctctgccgcgtcgtgcttcagagcggtgcgctggagatgatcgcagagattgaagcctgtcgcctccgcctgcgggaaggggataaactcactccgctggccgatgcgcgctattgtctgaataataatccgacgcaaactttgaagatccgcaacgccactcattatagcagcgagcgttggacaaacgccggcaaataacacgagcccgctccttttactggttatggtctgagtatcgtcgcatttgacagataaattctccttcgcccttttcccgctgtgacatactatcgggaatgtcagcagacctgaaacaaggagcgaatcatgaatatcaaggccgccagtctgaccccggaacaagcgcttgccgagctggaagcgcgctatgaagcctcggtcacggcgttacgcaaagccatcggcgactatatcgaccataatacgctccccgataccgaagcccgcgcggaaggtctttttgtctatccgcagctgtcggtctcctgggacggcgccgatcataaagccctcaaaacgcgcgcctggggacgtttcacccatgccggttgctataccaccaccattacgaatccgaaactgttccgcaactatttgctggaacagctgaccctgctgtatcaggactatggcgcgcatatcagcgtcgagctgtcgcagcatgagatcccctatccttacgtgatcgatggttccaccctgacactcgaccgctcgatgagcgccggtctgacgcgctatttccctaccaccgagctgtcacaaattggcgatgagaccgcggatggcctgttccatcccaccgagttctatccgctgtcgcactttgacgcccgccgcgtcgatttttcgctggcgcgtctgcgtcactacaccggcacgccggcggaacacttccagccctacgtgctgttcaccaactatacccgctacgtggatgagttcgtcagctggggctgcagccagatcctcgatcccgacagcccctatatcgctctctcctgcgccggcgggatctggatcaccgccgagaccgaagcgccggaacaggccatttccgatctggcgtggaagaagcatcagatgccggcctggcatctgatcacccacgacggcaaagggatcaccctgattaacattggcgtcggcccggccaacgccaaaaccatctgcgatcatctcgcggtactgcggccggacgtctggttaatgatcggccactgcggcggcctgcgcgaaagccaggccatcggcgactatgtgctggcccacgcctatctgcgtgacgatcatgtactggatgcggtgctgccgccagatattccgatccccagcattgccgaagtgcagcgcgccctctacgacgccaccaagcaggtgagcgggatgcccggcgaagaggttaagcagcggctgcgtaccgggacggtggtcaccaccgacgaccgtaactgggagctgcgctattccgcttcggcgctgcgctttaatctcagccgcgcggtagctatcgatatggagagcgcgaccatcgccgcccagggctatcgcttccgcgtcccctacggcacgctgctctgcgtctcggacaagccgctgcacggtgagatcaagctccccggccaggctaaccgcttttacgagggcgctatctccgagcatctgcagataggcatccgggcgattgacctgctgcgcgccgagggagatcacatgcactcgcgtaagctgcgcaccttcaacgagccgccgttccgttaatcgtcgatgacgtgggaatcgtgagataaacgctgacgttacccgccagggagcgtcagcgtccggagaagcgaaacaaacgacccggcggtgtttgtccacggaagaaaggcggtagacagaaaagcaaaaagcctgctcgaaagcaggcttcttaaatttggctcctctgactggactcgaaccagtgacatacggattaacagtccgccgttctaccgactgaactacagaggaatcgtgtgaacggggcgcatattatcgatgacgcccggcgctgtcaaagcctgttttcaataaaatgaatcgtttgccgaattattcttcactttgcgcaaaaaatggcgtttagcctcgcaaacgactcagctttcctccgatgaagcctttacgcgcggatatttccacagccagcggccgctcaccatgcggaaataaaacagcacgccgcgcaccgcccagtcgagcaccatccctaaccagacgccaatcacccccatccccagcacgatgcccagggtatagcccgccaccacccggcagccccacatgccgagcatcgacacccacatggtgtagcgtacgtcacgggcgcctttaaaagcgcagggtaaagtccacgacagcgaccagatcggcataaacagggcgttgagccacagcagctgtttaaccacttcttttacatcttcttcatgggtgtagaacgaggcgataaagccggcgaagggggcgctgccccaggcgatcagcgtcagaatgatcgtcgacagccaaaatacgtgccaggcctggaattcagcctgaccaatctgcccttttcccagccgcttgccggtaatgatcgtcgaggcagagccgagggcgttgcccggcaggttaattagcgaggccaccgaaaaggcgataaagttgccggcgataacgttggtgcccatcccggcgacaaacatctgggtcagcagcttgccgccattgaacaggacagattcgatactggccgggatgccgatccccatcacctcccagataatggcgaagttaaagggtttgaagtagcccttcagcgacagccgcagcgccggattgaggcccaccatcagcacccagatcgtggctaacgcgccaatatagcgggcaatggtcagcccaagcccggcgccgacaaaccctagccccggccaggagaagatgccgtagatgagcacgctgctgattaagatattgaggatgttcatcccgccgttgatcagcagcgggattttggtggtgccggcgccgcgcagcgccccgctgccgatcagcgcaatcgccgccgccgggtagctcagcgccgtcagttccagataggtcagcgccaggtccttgacctgggcggtggcatcgccggcgacaaaatcaataatctcctggccaaaggcatggatcacccccgccagcaaaatggaaaacagggtcataatggccagcgactggcgcgcggccgccctcgcccgccgccgatcgcgcttgccgaggctaaaggccaccaccaccgtggtgcccagatcgatggcggcaaagaaggacatgatgaccatgttaaagctatcggccagccccaccccggccatggcctcttttcccagccagctgacaaggaaggtgctcaacacccccatcagcagcacacaggcattttccagcagaatgggcacagcgagagggctgatttcgcgccagtacagcacacgataacgctgacgttttttaaaccaggatgtccgttcgacggcctggcgtacggcggaggtgacgttcaagagagaccttagtgagaaatgttgaaacaacatttcaaatgatgattgagaaatggatatcctgcaaagtattttccgtaataattgtcggaaatgacaacaaattgtcgatggaagcggcagttgcacctgaacaggcgaattgatgtttgacaaaagttttttcgccgctaagatacgactccacacgattcctctgtagttcagtcggtagaacggcggactgttaatccgtatgtcactggttcgagtccagtcagaggagccaaatttaagaagcctgctttcgagcaggctttttgcttttttgcgtcgctgacgttaactcagcatcgcatccagcctggcaagcacctcgttgacaacgacgtcaggtatgcgttccagacgcttgcctttccctaccgcctccctacgccccgcgtgtcctccgtgaacgcaccccagctcagcctgaaaaagcgcctgccagtaggatgaattcactaccgtttgcgggtgagatagcgaggattatccactctgtctaacgttatacccggaggcaccatgaacctcagacaacagcaacagcaggcgttcgatcgcagcggggaacctcttatcgtcggcaacgtcagccactgcccgctgccgccggagaccctcgccgcactgggccccgattccccctatgtggtgcaggtatacggctcaggcctgaccggcgaggtttatcgtctgcgcatcgccggcaaggagtacaatttaaagaaacgtcgcgccgtcgccggcgttgccaacctcaacggccagctgtcgtttttaaatgaggtacagcgtcggcaggcattgcaacagctgaaggatgacccggtcaccgcgccgcgcttcacccacatcgtcccaacgctgtatgccgattatcgcctcggcatcctgctctccccctggatcgatggcgagccgatacaccagttgaccccgccgctgatcgcccagctatttactactctggaagcctgcgaagaacaggggctgatggagtgggatctctgtagcgggaatctgctggtggaccggcaggagcagttatggctgttcgattttggctatatgtatcccttcgacccgctgagagaattcaacagcaatggtctggccgacccgctgttccactttgtcgaacgttttgagactcgcttcttttttagctggctgatgacccggatccctgacgccgaacagcagctggcgcaatatcgcgagatgaagcggctggcggtcgaaagctaccgccgaaagctcgtctggcttcgcgcccggcgcgctgacccgctggtgctggctcactttcagcagttgacggcgcgctgggagtcggcgctggcggaccctgccgcgctgagccagctgtttgccgtagaggcctttcgctcacatgtgctggatattgaagacgacctgcatggtcagtcctgtaccttactcaccctgcaacgcattgactgggtgataaaccagctggaacagcattatcgctttatcgccgacgaaggcggcctgttttacgataacgaagggaaatcgcagcaggcgctgctcaacagctatgcgcagaagcggcagcaggcgcaacagtacctgttgaatgccaccgccgcgaaggattaacggcgctcgcgtccctgcttctgcttcgcctggtacatcaggcggtcagcggtggccaccagcgcgttgagactgggatggctggcgggatcgtattcgacgcagccccaggagaacgccagctgccaggggtgagccgcctgctggttgaaacgcgccacgttgtggctgagcgtctccatcgccgtcgcggcatcgtggcggctggtattggcgaacagaataataaactcatcgcccccctgcctcgcgaggatatcggactcgcggaaggccgctttcatcaagtcggcgatggcgatcagcgcgcgatcgccctcttcatgcccccaggtatcattgatgtgcttgaagcgatcgaggtcgacaaacgccaggctcaccggctcatggcggcgctgggccgtcagcagggcatactctgccagggtgaggaatccccggcgattaaacagtcccgtcagctcatccgaggttgccgcatccagcaccttgaactcatcctccacgatcgccgccagatcgcttaagatctgcatttcatgggcggaaaacgatcgcggctggtgatccatcaggcagaacgacccgacggtcgcgccatccggcagttgcaccggatacccggcgtaaaagcggataaacggcgcctcaatgaccagcgggttatcgtgaaagcgctcgtcctgctgcatgtcgttgacgataagcgggtcggtttgcagaatggtatgggcgcaaaatgaaatatctctcggcaccgtgtccacatcgagaccggcacaggacttgatatgcaggagatcttcccccaccagactgatggacgccaccggcaggttatacagcgaacgggcaagcctggtcaggcgatcgaagcgttcttcttttccgctattcaacagcccggaagagcgtagcgattgcaggcgacgctgctcgtcgggatgaagtccggctaatttcattgtctctcacttgtctcttgcgcagaattccgccgggtttccgcagagaaacccggcgttttatcctgcgaggggaaaatagtcgtcaggtaccccatgagttaagcagatttcctctgcacgtcaaccggcgcgccccaggcgactggcgcccagggcgctggcggaatgccattaacggcactctgcccggcaaagagggcagatcaggcgcggataaacgccagcagatcggcgttgatggtatcggcgtgggaggtgtgcatcccgtgcgggaagccaggataaattttcagctggctgttcggcagcagcttgtcctgcaggatggccgcatttttataggggaccacctggtcgtcatctccctgcatcaccagcaccggcaaagtgatcgacttaaggtcttccgtctggtcggtctctgaaaacgccttaatgccttcataatgggctttggcgctgccgatcatcccctgtcgccaccagttctggatcgtcccctgggatatctctgctccatcacgattgaagccatagaacgggccagaggcgacgtcgagatagaactgggcgcggttcgccgccagcgctttgcggaaaccgtcaaacacctcgatcggcgtcccgcccggattctgctcggttttcaccattagcggcgggacggcgctaattaacaccgccttcgccacccgcccctgcggctgaccgtagcgggcgacgtagcgtgcgacctggccgccgccggtggagtgcccgacgtggaccgcattgtgcagatccagatgttccaccaccgccgaaacgtccgccgcgtaatggtccatatcgtgcccctcgctaacctgatcggagcggccatgaccccgacgatcgatagcgatgacccggaacccttcggcaaggaaaaataacatctggttatcccagtcgtcagcgcttaacggccagccgtgatgaaagacaatcggctgagcttcctttggtccccagtctttaaagtaaatgttgacgccgtcttgggtggtgacaaatgccatattacagactcctctttcaggataaccagcctgcaggcccgtgcctgggctgaacgccgacggcggccggcaggagtgccgaccgcacaggaatgtgatgcctgtaacagtgtagaagatatttaacgccgggcgggacaacttaccctgtctcgcttgattcgccgatcctggaccagaccgcgtctggtatcaggccgcactctcctgctggcggatccgcaccatcagcgcgccgagcagcgcccagtcaagcagcacggcgaaggcaaagcagacgccatggcgtcctcctcccgcagtatgccaggtcagcagcgtcgccgcgatggcgatagctacgctcagcaccgtggcgccgctgacccgcatccccggcagcgccgtcctacccgccgcaatgcgccaggcgacagccgctcccgccccaccgcacgccacgcccggcagcagtgccggccagtcctgcccgccataccaggccaccagcgccagcagccagccggccgctgacagcagaaaggcccagcgcgtcgccgccaggggtgagcgataaagccaggattgtccgcgagtgaatccccacccgacgccaaaggccgcaatcagcgccgtcagcagactcagcgtgccggtcaccccgataaccgggggcatgattaacagcaaggccccggcggcgatgaccacgctaagggcgatagcgcggccgcgggggtcgatcgttgccgcggcttccgcggcggtgtagcggcttacaacgtgcatagttgactcctgacaggcgaagctgcatgaatttaattcatgtcattgtctttacatgcccgtagcctatcgccacaatatcgccttacacaaacgcatagttttcagccatagatgagaaaaactcagccatgagaccgccccgtctgccgccgctgggggcgctacgcgcttttcatgccgtcgcccgccaccgcagttttaaacaggccgccgaggcgctcggcgtcagcgcgacggcggtcagccatcagattaaactgctggagtcggtgctggagtgccgggtctgcgaacgcagcgcgcagggcgtcagtctgaacgctgatggcaagatcctttacgcggccacccaacgcgcctttagcgccctggaacaggccgtcgtccagatcgctcatgcccgtcagccgccatccttaaccgtcaccaccacctccaattttctcacccactggctggtgccgcggctggcggatttcaccgcccgctttccggctatcgacctgcggctacacaccagcgtcgaacgagtggatctgcatctgggcacggtagacgccgcgattcgctatcgtgaaacgccggagccggacctgtactgcacgctgctgtatgaggatcgctttatcgtggtcgccagcccgactctgggcctcagccggcctgaagatctgcagcgggtgacgctgtttcacgttgccaaccggcgcgtgccagctgattcgccgagctgggagaactggcgtcggcgctatggaccgccgacgctgaatattgatgcggggttaacctttagcgatgagacccatgccctgcaggcggcggtggccggtcagggggtggtgatcgccagcgaactgctggcgcgggatctgctgcagcgcggcgtattgtccgcgccgttcagcaacgcattgcctggcgcccgctactacctggtcactaccgaagcggtagcgcagcgggcggatattattgctctgcgggagtggctgctcagccagatggcgtcgggcgacggcggccatccgactgcgggatagcgggcttaccagccgcagacgttggtctcttcatcggactcgtagccgcgaacgatattgatcagatccttcaccgtatcagcggcggtgagcgggtcgcgcagcgccgccagcgaggaaaaggttttatcaaccgagacgccgttattgttattggtgaccgtcaacagaaactccccctcttccctgtcgtccggcaacttgctcagcaggtcattaacggcctccaccgcctgctgtggaatatacaacaccattggtttgagaaatattttttcctgcttctggtgaagtcggccattctctagcgctaaggtataacctttattttcactggtcatctcttgttatccctcgatgagaatttttggatcaacataaaagtcgacattaaaaaccgtgtcctctgagagggcctcaatacagtgccacttctccggcggaaagacgccaaactggccggcttcaatagtcagggtttcaacgggctcggggctggtttcatcggcatagccgagatagcggatcgccccctgcatcaccgagagacgagggtagacgccctgccgggtgccggcatccagatggcggcgccagatagaggccggggcggtctctttggtccacagcggcgtgctgcgggtgtgaacgtaatgggtgggaataatgattcgctgcatgattgtgcctcactttaccgtctcaaacgcgacgttcagaaatagcctatatgatgcatatcatataccccttttaaacgttaaggatattattttgttgtggaattttacgcctactcctttttatacctcgcagggattagcgctaagagaaaataaaaaaggcgatttcaggatcctgaaatcgcccggagaataaaaataaacgcgttaaaaatttgttagcgcagcggactcggtttgccgattaaatatccctgaaccaggtcacagcccagcgcctgcagcgaagccaactgctcttcggtctctacaccttccgccacaatgcgcatatgcaggctctttcccatgctgataatcaggcggacgatatccagatcgtctttttgttccggaatattgatgacaaacgagcggtcgattttaattttatcgaacgggaagtagcttaaacgggacagggaagaatagccggtaccaaagtcatcgatggagatctgaatgcccagctcgcgcagctggctgagaatttccagcgaacgggtgttctcattgaatacgtccgactcggtgatctccagatcaagacgtcgcggatcgaggccggtctgatgcagcacctcgataatggtgtcggtcagcgatgtattcatcaactgaattggtgaaacgttgaccgagaccttcagcggcgtcgcccagctggccgcttcggcacaggcggttttcagcacccattcgccaagggcattaataagaccgattttctctgccaccggaataaacaccgtcggcggcacggcgccgcgcaccggatggaaccagcgaaccagcgcttcatagccgtagatttcgcgcgtgacggtatcggcgatcggctgatagtagactttgaattcgtcatgggccagggcctgcagcagatcgtcttcaaacgatttgttctcctgcaggcgctgcagcatccccggccggaagatttgcacatggccgctaccctcttttttcgcctcatacagcgcgaggtcggcgcacttgtacagataatcggtacggctttcaccgtcagagatcacgatcccaatgcaggcgtcgatattaatctgcgcatcgtagatctgatagggctggctgatcttctcccggataatattggcccgctcaagggccatctcctcagtgagatcgtaggagagcatcgcaaactcatcaccgccaaggcgatacagcgtctcggaggttttgcggaaaaaagagaggcgactggccagatcctgcagcagcttatcgccagcatcatggccaagggtatcgttcacatccttaaagctgtcgaggtcgaaaagcatcaccacggcgcatcccttatagggacgcacctggttgacgatctcctgcagccgctgccagaaagagagacggttgggcataccggtcagcgaatcatggtaggcatcgtactgcagccgtcggttctgcacctgcagcttctctttcgaggcctgcagatcgttggccagcgttttcatacgaacatgggcgcgacgcagattattattctgtcggagcatcagcagaccgagagttatacacatggcgatcagcagaatggagatcaccgagtagatataatagagatgctggattttatcatgggtgatattaacgatattgatatcttgcatcagggtggcagcggccattgaggtcagcggaccatccagctcgcttaacaccggcaggatctgtctgacctgctccggcgtcatggtatcaacttgtttatcgagcagatgaagattacgaatcagcgtcgcaaccaccgtcttccgctgctcgcttttattgataaatttacccagatcgccctcctgcagaagctcgatctggctcatcatgatctcaagacgcaggcgcacctcatcgtggtccgccccttcggccccaatcgccattcccgccagacgagactccagccgcatatattccgacaccatctgcgacattgaccacgagtccgtatagcgggtaaatttttgcaactcactttgtcgctcatgcaccagataagtaatatatccggtgacaacaaataacgacaaaataatagccgtgagtattcgattcaagatccaacccttattctataatcatctttgaaacttgccaggccgatcgggaataatagatctggttctgtaattcagcactgctgtcgtaagggtagacaataaataacgggcctttatcacgaatgcgcatatattgaccgttcatttttaacgccataatgaccgggaatttataaaaatcatcaatcgggataatggtggtgtagtcgttcagcgccagcacgcgggccgatgtgcctttcgcgccgactaaatccatgagtttactaaggggaataccgtcaaaacgaaccttgccggtgtaccagggggtggtggtttctatcgtcttcatccccagtttttccagcattgcgagatcaaaaacggccttgtcgccgacattcatatttccgatttttccggaaatggtcagtacaggttttcctgtcggcgcaggcagtttttcagcataagcagaaggcaacatgacacaacaaaataaaactgcaagaagtagacgcattttactcaccattccagagagggagacacgttaagtgtaaaccatttacgtcgattcttaaaaggtgtccatctttgttatccgttgatttaattaaaagtataagctggatggcaaattgccagaatgttaagtccagggtgtgatttcgaccgtctttcccatcgattcttttttgcgccatctcccccgcttagcaggcaaactactttcctccacggccgctgcgcggtagtctcagagcagacgcaacggtaaaagcgtctcattccaataacaatgaagtacgtgactgacaggacagggtatggattcaacaataagcgtgcagcccggcgaggcgccagattcactacatcgggcccggcgggcggcctggggtagttttgccggcgcggtggtcgactggtacgattttcttctctatggcattaccgccgcgctggtgttcaaccgcgaatttttcccgcaaatcggcccggcgatgggaacgcttgccgcctttgccaccttcggcgttgggtttctttttcgcccgctcggcggaattatttttggccacttcggcgatcgcctcgggcggaaacggatgctgatgatgaccgtctggatgatgggtatcgccactgcctgcatcggcctgctcccctcgttcaaccagatcggctggtgggcgccggtgctgctggtgttcctgcgagcggttcagggattcgccgtcggcggcgaatggggcggcgcggcgctgctctcggtggagaatgccccacaggggaaaaaagccttttacagcagcggggtgcaggtgggctacggcgtcggcctcctgctctctaccgggctggtatcgctgattagcagcctgaccagcgaccagcagttcctcagctggggctggcgcgtaccgttcctgttcagcgtggtgctggtccttattgcgctgtggatccgtaacggcatggcggaatcgcaggagtttgaagcgcagcagagccaggacaacgcgccgcagatgaaaaagcggctaccggtagtggaagcgctgcttcgccatccgggagcgtttttactgattatcgccctgcggctgtgtgaactgctgacgatgtatatcgtcaccgccttcgccctcaactactccacgcaaaacctcggcctgccgcgcgagctgtttctcaacattggcctgctggtgggcggtcttagctgcctgactatcccctgtttcgcctggctggcagaccgctttggccgtcggcggatctatatcaccggggcgctgatcggcactttgagcggtttcccgttctttatggcgctggagagtcagtccgttttctggatcctgttcttcgccctgatgctggccaatatcgcccatgatatggtggtctgcgtccagcagccgatgtttaccgagctgttcggcgccagctatcgctatagcggcgccggcgtcggctaccaggtggcgagcgtggtcggcggcggctttaccccgtttattgccgcggcgctggtcaccttctccggcggatcgtggcacagcgtggccctctatctgaccgcaggatgcctgctgtcagcgctcaccgcgctgatgatgaaaaagcaccccgtcgactgacccaccagcggagggcgtaacccgcgccctccggtaaggagaatgcatgtctcagttaaccctggccgactgctggcctcgccgtttttccccctcttcgctggcgctgcagttttgcgaggatcccacccaggcggaacagccgctgtttgccaaagccagcgccggcgaggccgtcgcccagctctggcaggcgccgcagggattggtggtgccggggagctatcgtcagtttacggatctgccggcggtcagcgcgcattttgccgcgcgcggctggccggtatggcttcgccgctccggcggcggtctggtgccccaggggccgggcattatcaaccttagcctcgcctggccggtgcagcagccgctcggcgaagccgccgaaccgatctatcattcgctgtgcgcggtgctgcagcgtaccctcgcgcgcttcggcgttgccagccacccccgggcggtaaacggttccttttgcgatggccggtataacctcgcctgcggggagggcgaggcggcgcgcaagattgtcggtaccgcccagtactggcggccgctgacggcaggccgcggccacgtggtgctggcccatgcggtgatccttattgacgccgatctgagcgcggcgcatcaggcggcgaacgccttcgaagcgcagctcggcagcgagcgggtctattgcgctgacaagaccgttactctcgcgcagctgcttcccggcgagcgccatctgctgccccgctttagcgagacgctggcgcaggagctggacgcggctcgctgaaggtcgctttcaggtagcggctgaaggtttccaccgcgcgcgacacgcgcggagtatagggccgaatgacgtatagccggtcggcaaacacctccaccggctgccacgccggcagcagctcctgcaccagcccgcggccaatggcctcccgggcgctgaaatccggcaacagcgccaccccaagccccgccagcaccgcatcacgtagcgactcgctgttattggtggcgaatggcccctgcacgttgatggtcacccgagcatcgggcgactgacgggaggcgaacgtccactgcgggcgctgtggcccacggggataggtcaggcactggtggtggcgcagatcttcgggggtctccgggcggccatggcggcgaatatagtctgcggacgcgacggtaagcgtcgcggtgtgacacagcggccaggcgacgtgggtatcggggagcgcctcgcgccgacagtggcggatggcgagatcgaacccttcgctggccagagagaccagccggtcggtgacctcaagctgcagatgcagctggggatgctgatgcaaaaaaggcgcgattgccgggaccagctgctggcgggaaaaggccaccggcgcggtcaggcgcagcgttccccgcagcggcccgccctcatcgcaggcgccggtgaaaatatcccgcagctgaccaaacggctcgttgagctccgccaccagccgcagtccgtcgtcgctgaggctcacgctgcgggtggtgcgatggacgagggttttaccggtcacccgctccagctcgctgattttctggctgatagccgacttgctgatccccagcttttccgcggcccgggtatagcttttttgttcttccagcaccgtcagccagtacagatggggccagtaactctccggacgactctcgctcatgtgattgttcaccagtaaaaacaatgtattcaactatagcggtttttgccgacggcggcatcggctagcatcttgttgagcccatcattattccctaacgataaggagcacctgcatgccattactgacatttgacctgattgaaggccgtacggaacaggaggtcaaaaccctgctggatgccgcccatcgcgccgtgctacgcgccttcgaggtaccagaacgcgaccgttaccagattgttcatgaaaacaaagcccaccatatggtgattgaagataccggcctcggtctgacccgcacgcgggatctggtggtggtgcgggtctataccagcccgcgcagcgaggcgcagaagcagcgcttcttcgccattttgcaggaggagctggcggaacactgcggcctgagcggcgatgacctgatggtgtcgattatcagtaaccagaaaggcgactggagctttggccgcggggtcgcgcagtatcttaccggcgatctgtaacccgcagcccgcagtacgcccttagcggcgggctgccgtcgcgatacgctgccgcgcctgctgctcgatattctccagcaactcctggacatcgtcttcatcaatgtcgaggaactggccttccagcagcgcggcgtgaatatcttcccgggtgaccgaaatacccagcggcaccgccctggatttgacctcctccgccgccagcggatgcggataacggcggccaaccaggttattaaacacaatagccagcagcgccagcatcagcgagttgaggagcaccggggtcagcacaaagtgatagccttcgctgtgcaccccggcgccgccgaggatcgccgtcagggccaccgcgccgccggggggatgcagacagcgcagaaaatacatcccggcgatggccagagccgccgccagaccgcaggccagcgccgcatcggggaccagcatacccaccgtgacgccgatcagcgccgacagcacgttgccgccgacaatcgaccacggctgcgccagcgggctgctcggtacgccaaacaggagtaccgccgaggcccccatcggggcaataaaccacagattgacttcgccgagcagccagtggctgaacatgctggtcaccgccagtccggtgccggcgccaatggatcccagcacgatatgccggcgggccaccggcagcgcgtgcggcttcaggcggccaaggaaaatccgcagccgtgaaaatatccccgcaggaataacactcaacatcgcttcatcgctcaaatcataggaattacttatattttattttctttttttaaccttaaattaacaaccctgtctttcgcaggggatagcgcgggcggcgatgtccgacggcattgtgctgtgaattctcgcgggggctgatagaatcccttttcggtcagggggataccccttttgcgaattgaaggtcataacccagtgaataataaaatctctttagcgaaagaagtggcatgggccagccagaatatgccgcgtaccctgcgtcaggtcgccgcgctgcccgacctcagcggcgtgcgtctggcctgctgtatgcacctcgacatgaaaatgatcccgctggtgcaggggatcctcgacaagggcgctcaggtctttttaaccacctgtaaccccaccaccgtgcaggacgacgtggtggcctggctggtggagcgcggcgccgaggcctgcgcgtggcgcaatatgagcgatgccgactggcaacagtcatgggaaaaagcgattgcctggcagcccactcacctgtgcgagatgggcgccgatatcaccaccctgctccaccagcgcggcgagtttgggaacatcgtggcgggtctggaagccaccggctcgggcgtcaatcggctgggggatattcagccaggctatccgatctttaactgggacgatctgccggtcaaagagggactgcacaaccgccatatggtcggtctcaccgcctggcacaccttcttccagaccactcacctcactctgcatgagaaaaaagtgctggtgatcggctacggcctggtcggccagggcgtcgcggcggcggcaaaagcttttggcggtcaggtgatggtggcggagatcgatcctgcccgccgtctgcaggcggcctacgacggctggcacgtggtggacctccaggaggcaatcgcctcggcggacgtggtggccacagcgacaggcggtaaaaacgtggttaatcgccaggcgctggaccgggcgaaagcgggagtatttatccttaacgtcggccacgtggcggaagagatcgacggcgagtacctgcgccagtacccccaggaagaggtgatgccgtatatcaacgcctaccgcatggccgacaaaaccgtctatctgctggccaatggttcaatgctcaatctgaccgctggcttcggcgacagcctgaacgcctttgacgtcaccctcgcggtgatggccagcggcatccgccatattgtcaccgacggcatgcgcgccccggcgaaggtttatctcctgccccaggcggtctggcagcaggccctgtaaacccggcgcatcgcccccatcgcgggacgatgcgctttaccatcaggacgacggcgcgctatcgggcaacacaatattgctctgcgccagcgttcccatctggttgtacatcacgctggcggcatccagcaggtgcatcgccagcgcggcaccgctgccctctcccaggcgcatgtccatatcgagatacggccgcagacccagcgcgtcgagggcgatctgcgctcctttctccgccgacaggtgtgaaggaataagataagggtgcgccgacggggccatgcggcaggcggccagggcagaggcataggagaggaagccatccagcaccaccggcaggccacaggaggccgccccgaggatcaccccggtcatgcccaccagatcgtaaccccccaccttcgccaggacatccagcccgtcggccgggttcggctgattatgggctatcgcctggcgcaccaccgccaccttatggccccgctgcgccagcggcagattggccccacagcccaccaccgcgtcagggtcgctgcccgtcaggacactgatcgtcgctgcggccggggtggtattggccattcccaattcgccgacgccgaaggctttcaccccgtcggcagcgagctggcgggtgagatgcatgctggccagcagcaccgtctccgcctgctggcggctcatggccgccgtccgggcgatattcccgctaccgcgggccaccttgaggttaatcaggcccggcagcgggtcggcatcgatgccgacatccaccacctgcaccctggccccggcctgcgccgccagcacgcagacgccggtgttgccccgcaccatattgccggcatgaatggccgtcaccccctgcggcgaaggggtcacgccttcatgccagacgccatggtcggcgcacatgaccacaatcgctttctccgccagcgccagctgcccctgcaagccaggcagaccggccagctgcaccgccagcgtctccagacggccaaggctgccgggcggctttaacaggccatcaatatgctgctgagcgcgcgccatgcccgtcacatcgggctgcggaatggcagccagtaacgccgaaagtgtttccattctgttcctcaccgttggtgtcaggccttacagcagcgccagtaaaaagagtaattcgcccagctcaatcgccgccccgagggtatccccggtctgcccgccgagggttcgcttcagcgcccatcccagaccccagatcagcaccagggtgatcagcgcggcgcgcagcccctgcagccccagcagggcggtggccagcgcgatcgccatcgccatcgtcaccagcgtctgctgcaggctaattttgccgataaacagattgcccagccccttttcccgcgcatagcgatgacgatacatcagcagcgccgccatcccgcgaccgacggcgcaggccgccgccagggctgcgatggggtggatatcacgcagcagcagctcgccaaccaccagcactttcgccaccagcacaaagatcagcgccagcccgccgtgggtgcccagccggctgtcgcgcatgatctccagcatccgatcgcgggtgcgggcggagaaaatgccgtcgcaggtatcagccagcccgtcaaggtggaatccgccggtgagcagcgccagcgccagcacgccgaaaagcgccgccagcgggacgccgcaccatggctgcaggaggagcgccaccgcgccggcgatggcgccgagcagtaaaccgaccagcggaaaggtgacgatactgcgctggtactgttcgatctccaggccctgagataaccgcgccgggaccggcaggcggctgataaacgagagtgcagcaaagaatgacttaatcacgtgaggttgactcctgtcggcgaaagcagcggaagagttctgtcgcgcccggtcagcacctgagtttgtcttctggcgaatcgatcgtcggagaggtgagaggtgttgagatatcgccctgacgccgctgcgtcagatgcccggccaggatgagagaaacctttccgatatcaatacgtttttcgcgggccagtatagcaaagtgtcggtgaggagaggcagttgccggaacaaagttttcgcagaaaaaagcagggaagagagggaaacgcggaacagcccggcgacgcttaacgccgccggaccggcagggtttagccttcgactttggcttcgcccatcactttcagttttttcgagatgtcgcggcgctctttagacagctcggcatttttgatgatgtaatcatcaacgcgatcttcgtaatcgctcttcatgctggcgatgatgccctggatggcttccacgctcatgcccggtttgatgtagtcgctgaggttgtccagcagcagaacgcgcttctggttatcacggatctttttctcaacgtcctgaatttcacgctgcagtttgttcttacgacggtacagacgaacaaactccagtacgtcctggaaagaaggcttagttgtttccatttttacacccctaataattgagattcggattcgtaaagcgactgcgttatagggctaacataactgctagcagccgctgatgacaatgttttttcctttgcgtttatcataaccctaaacgctgctgaatcgaaacaacccatgtggttacccggtgcatctggtgtttatttgcgcaacgcgcggcagatcagatgcgagagcagctccagctggcgcgccagttcgattgagagccaaacatagccatggaccggggtttccgccaggccgtcatcaccctgctctttcagcagctggcgcagttcgaggacgatctcagtcagcttttcattgttggcgcgcacaggctgagggttcccttcgtacagcgcgtgggcgatggacaacagcgtctgctgggtcatctgctgcgtctcccgcagggtgtgcgcattgagcatcacgaagtgacccggacgcgttgcccaccaggcgttgatctgcagctccagcatgcagacgaggttgcggctgacggtctggatagcctcgaagatcgccttctggatgtgcgtctctttgctggcgggggtgatcagcccgcgcattttaaccacgtcgttcagcgcctgctggagatgcttttccagccgcggtcgatccaccagatttggcgagaagccggcctggtagaggcggttaaagttggtgacatagctggccatctggatgcgccagtggatgaacgcccgctgcggccagatgccggtaaacagcatcgccagcagcgagccgaagatcacgtcgccgcttcgccacagcgcggtatgcatatcgccgggcggcgccccgaccaccaccgacagagtaatgccgatcagcagcgcctgatagggtttcttgcccagcgccagccagccgcagaggaacatcgccgccgcgcaccagaggaccatcagcggcagggagatgagctcaagcttcagcgccaccagccccagcgccgaaccgaggatcgtgccgccgatacgctgaaacgcccgcggcacgacgttaccccagaaggagatcggccccatcaccaccaccagagtgatgagaggccaggttccctcaggcacgttcagcagccgcaccagcaaaaaagtgagcacaaaggccagcgcaatccgcacaccatgcaccacccgataatggcgatacaagcggatctcaaatggcttgagtgatttatcagcgcgcacaaccctctccggcaaaacgaaaaggccaattgtaactgctttttcgcccggagcatgccgggaatgtaaaaaaccttgtccggaacaggggtaaactgctacgacgcgacgcgctcaacgggaacatacatgtcgatatcccagtagccgtcgtggttgccgtcgttaagatagacctcaaagcagggctggggggcgatgcgatacgccgtgctctgctgcaggctgtcgaaaaactgcatccacggagtggcgaagtcgtaatccaccacccgcgcgcgggcgcaggcgtaatccccgccggcaatcgccgccagaatcaccccttcgctgttggcgggaatgacataatcctcatccacggcgaccgctgtcgcgcagcgcagtttttccgccggcacttcctccgggttatcgtagtagacggccacccattcgcgggcgggcacctggtggttctcaacccacatcatcagttgctcaaacccctgcttgaccgtgtgatcccagggcccgaccagatggaaaccggcgatggttttcttgccgagggtggtgatgctgtagttcattttgcctcctttggagataaattactgtatgaatatacagctaatttaacaggagatcccccttcagtatgtgcgcgaattcacagagtcgccaccacactgctgtaaaaacaggcgccccgccagcacgagcgacaggcgaaaaaaaaccgcctgcaaagaggcggttggcgtggttacagctcgtgatgcaggtaatcgctcattcgcgagaacactccgcctttattgatgctttcgagggtgaccagcggatagtgccccaccaccttgtcgccgtcatacagtgaaatctcgccaacccgctgattggcggcgatcggcgcctcaaggtccttcttatccagcacatatttcgctttaatgcgcgacacttccgccttcggcagggctaaccagaaatcctgatcggtgccgagcttaatctgctctttatcgccgtaccagatacgctcggtgccgaccttctgccccttctgcagcacctgcacggtgtcgaagttctgctgcccccagtgcagcagtttagcggcctgctgctcgcggcctttcggactgtccgcccccatcaccacggcgatcagccggcgctggccatccaccgccgaggcgatcaggttgaacccggcccccgaggtgtggccggttttcaggccatcgacgttcatggttttatcccacagcagaccgttacggttttgctgggtgatcccgttccacgtcaggcttttctggctgtacatgtggtagacgtctggttcgccatgaataatcgcccgcgagagcaccgcgaggtcataggccgaactgtgctggcccggggcgtcgaggccgtggacggtttcgaaatgggtgtcccgcaggtgcagtttttcgacatactgattcatcagggcgacaaactgcggctggccgccggcgacatagtcggccagcgcgacgcaggcgtcgttaccggagtcgacaatcagcccacggctgaggtcgcggacgctgacgcgatcccctggctttaagaacatcagcgatgatccgtcgaacaccgggttgcccttcgcccaggcgtctttacccacggtgacgatatcgtcaaaggtgatacgatggctgtcgatggcgcgatcgaccacgtagccggtcatcagtttggtcagactggcaggattacgctgctgatgttcgttacccgcggtcaggacctgaccggtggtgtaatccatcagcacccaggagccagcctgaatggaaggcggcgcgaccgtagcaggtaagtcgacggcaaatgcgcaggaaacgctcgaagcgagcaaagatacagcaataaacaaacggcctttcaacggcatatcctctagatttacagatccgccgtcctttttacggaacttcgcgtttcatatcagggtttaattgcaagaaaatatgacacagcagaggaagttgcttgccgcgacccttctgatgaccgggcaaatcgtttaccataccggtcgcacgccaccacggataatgaacagactatgcaagatagcgtcaaccagcccggatttttattccacgattatgaaaccttcggcaccagcccttccctcgaccggccggcgcagttcgccgccatccgcaccgacgcggagctgaatgtgctcggcgagcccgaagtgttttactgcaaacccgctgacgattacctgccgcagccgcaggcggtgatgatcaccgggatcacgccgcaggaagcgctggccaaaggggataatgaggccacatttgcccgccgcatccacgatctgttcacggtgccgcaaacctgtatcgtcggctataacaacgtgcgctttgatgacgaagtgacgcggaatatcttctatcgcaacttctatgacccttatgcctggagctggcagcacgataactcgcgctgggatctgctcgacgtgatgcgcgcctgctatgccctgcgccctgaagggatcgcctggccggagaatgacgaagggttgccgagcttccggcttgaacatctgaccgtcgccaacggtattgaacaccagaacgcccatgacgcgatggccgacgtatacgccaccatcgccatggcgaagctggtgaaaacccggcagccgcggctgtttgattatctctacagccaccgcaataagcgcaagctggcgacgcttatcgacgtgccgcagatgaagcccctggtgcatgtctccggcatgtttggcgccgcgcgcggcaacaccagcctggtggcgcccctggcctggcatccggaaaaccgcaatgcggtgattatggtcgatctggcgggcgatatggcgccactgctggaactggatgccgatgccctgcgcgagcggctttacaccccgcgcgccgagcttggcgatctgccggcggcgccgatcaagctggtgcatttaaataaatgtccggtactggcccaggccaataccctgcgcccgcaggatgccgaccggctggggatctccattcagcgctgtctggagaacgcccagctgctgcgggcgaatccgcaggtgcgcgagaaggtagtggcggtctatgccgaagccgaacccttcgtgccgtccgaaaacgtcgacgcccagctgtacaatgggttctttagcgatgccgaccgcgcggcgatgaaaatcgtgctggaaaccgaaccgcgcaatctgccggcgctggatatcaccttcgccgaccagcgtatcgaacgcctgctgtttaactaccgggcgcgcaacttccccggcacgctcgatgaacatgagcagcagcgctggttagagcatcgtcgtcaggtgtttacgccggcttttttgcaggcctatgccgatgagctgcagatactgtatcaacagtatgcggatgataaagagaagctggcgcagctgaaggcgctgtggcagtacgcacaggatattgtctgattggctgaaattcccgggttgcggctaacgccttacccgggctacaaacgatgaccggggaggacgcctgaccgtaggcccgcgcaagtgcagcgccgccgggcattgcgtccccagttcgtgcttacctttttgcccggtggcggcttcgccttaccgggcctgggcgctggtaccagagtagcccgggtaagacgcctcgcgtcgcacccgggaacgttgcttagattttcgcgcggctggcgatgatttcatccgccacattacgcggcgcttccgcgtaatggtggaactccatgctgtaggttgcccgtccctgcgacatcgagcgcagcgtggtggaataaccaaacatctccgccagcggcacgtcggcgcggatgatctggctgccgaagcgctcttccatcccctgcaccatcccgcgacgggaagagagatcgcccataatattcccggcgtactcttccggcgtctccacctcgacgtgcatcactggctcaaggatcaccggatccgctttgcgcgcgccctcccggaagccaaagatcgccgccatgcggaacgccatctccgaggagtccacgtcgtggtacgacccaaaggtcagggtcgctttcacgtcaaccaccggataacccgccagcacgccggtgcccatcgcttcgcgcagccctttctccacggaagggatgtactcgcgcggcaccacgccgcctttggtggcgtcctcgaagacgaaaccgctgcccggcgccagcggctccagggtcagcacaacgtgcccgtactgccctttgccgccggactggcgcacaaatttgccttccacgtccgtcactttcttgcgcagggtttcgcggtaggtgacctgcggacggccaatgttggcctcgacgccaaactcgcgcttcatccggtcgacaatgatctccagatgcagctcacccatgccggagataatcgtctggccggactcttcatcggtatgcagacggaacgacggatcttccgccgccagccgctgcagcgcgatgcccattttctcctggtccgctttggtcttcggctcaatcgccagcgaaatcaccggctccggaaactccatccgttcgagggtaatcaccgcatccggatcgcataacgtatcgccggtggtcacatccttcagaccgacgcaggccgcgatatccccggcgtgcagttcgtcaacttcgtgacggtcgttggcctgcatcagcacgatacgcccgatgcgctctttcttacccttcaccgggttccacaccgcatcgcctttcttcagcgtcccggagtagacgcggataaaggtcagctggccgacgtaggggtcggtcatcagtttgaacgccagcgccgacagcggctcatcgtcgctcggatggcgttccgccggctggccttgctcatcaacgccctgtatcgccggaatatccagcggcgacggcatcagctccaccaccgcatcgagcatgcgctgcacgcctttgtttttaaaggcgctcccgcagagcaccgcctggatctcccccttcaccgtgcgctggcgcagaccggcgacgatctccgcctcgtccagctcaccggtttccaggtatttatccatcagctcatcgctggcttccgccgccgccgagaccattttctcccgccactgctgcgccgtcgccagcagatcgtcagggactggcccatagctaaaggtcatgccctgggtggcgtcatcccacaggatggcgcgcattttcaccaggtcgacgacgccggtgaaatgctcttcagcgccaatggggatcacaatcggcaccgggttagccttcaggcggtcgatcatcatctgcaccacgcggaagaagtccgcgccggggcggtccatcttgttgacgaaggccagccgcggaacgtggtatttattcgcctggcgccagacggtttccgactggggctgcaccccgccgacggagtcgtacaccatcaccgcgccgtcgagcacgcgcatggaacgttccacctcaatggtgaaatccacgtgccccggggtgtcgatgatattgatccggtgcggctcgaagctgcggtccatccccggccagaagcagcttaccgccgccgaggtaatggtgatcccgcgctcttgctcctgcgccatccagtcggtggttgccgcgccatcgtgtacttcacccagcttatggctcatcccggtataaaacaggatgcgctcggtggtggtggttttaccggcatcgatatgcgcggagataccgatgttgcgataacgttcgagagggatgggtcggggcatgatgcgtccttagtcgttttgacggtcagtctgcggtcggaatgatccgcagttcatttaactgcgtctatcttagtacaactgtacgagtatattcgaactatttttgctatcattacgattgggcaggttgcggcggcgcgcgtggtatcagaaccggagtttgggtatagtagccgccagccgccgatatgggctgcggctgccatgcgccgcgccaccgccgacacaggattattatgatcgccaatcaccccgaacgagaacaaattcgcctggaaaatgtcctttccgcgctcggaaacccgctgcgactggagatcattcgtacgctggccgacggcagcgagctgagctgcaacgccctgcgccaggaggaggtggccaagtccaccatgacccaccactggcgcgtcctgcgcgacagcggtgtgatctggcaacggcctcagggacgggagaatatgatttcgctgcgccgggaagatctggacgcccgttttcccggcctgctggatacgctgctgaaagttatggtgcaggcaggataagctcttctgccgggtggcggctgcgcctgacccggcctacggcggcctcccgtcagcttatgtcccccaggcccggcaagcgccgccctgcaaaaaaatcagacctcgatgtcgaaccggcgcagacaaaaaaaagccggaggtttccctccggcttttattatttacatcacgctatgccttaggccacatcttcgtactgcggcaccgggttgcggaagcttttggtcacgcaggccagatagaccagaccgataccggcccagatcaggcccagaatcatcgagctctcttccaggttgacccacagcgcgccaacggtcagggcgccgcacatcggcaggaacagatactggaagtggtctttcagcgtcttgttgcgcttctcacggatccagaactgggaaatcaccgacaggttaacgaaggtaaacgccaccagcgcaccaaagttaatcagcgccgtcgccatcaccaggtcgaagttaatcgccagcagcgcaatcgcgccgaccaggatgatgttcatcgccggagtgcgccaggtcgggtgcacgtagccgaagaagcttttcgggaacacgccgtcgcggcccataacgtacatcagacgcgccacgccagcgtgcgccgccataccggacgccagtacggtgatggtggagaagatcagcgcgccaacctggaaggctttacctgccacgtagagcataatttccggctgtgacgcatccggatctttaaagcgcgagatatccgggaagtacagctgcaggaagtaggtggcaaagatgaagatcaggccgccgatcagcgcggtcaggaagatcgcgcgcggaatgacgcgctctgcatctttggtctcttcagacaggttgctgatgccatcgaaaccggtaaacgagaagcacaggatcgtcgccccggtaatcatcgggatcacgtgagcgtcaccggaccagaacggacggctgctggccagcgtaccggcgccctcgccttcaaacacgccataaatcaccatgccgaggataacggcgatcagcaccacctgcagcaccacgatcacggtgttgaagttggccacggatttaatgctgcgcaggttaaaggcggtcataaaggcgaccagcgcgataacaaacacccacgacggaatcgaaggcaccagcgcttcaaaatagattttcgccagcagaatgttgatcatcggcgcgaacaggtagtcgagcagcgaggaccaacccaccataaagccaacggtcgggctgatggatttctgcgcataggtatacgccgagccggcagaagggtaacgacgtaccagcttgccatagctcagagcagtaaacaggatagcgattaacgcaaaggcgtaggccgtcggcacgtgaccgtcggtcataccagagacgataccaaacgtatcgaacagcgtcatcggctgcatataggccaggcccatcattacaaccggaactaacgtaagcgttttacgtaattccacgcgagaggtatttggagtagcgttatgcgacatagttatccccttttacggtgaacgccagcgcgtaagcaaaaaattgccccatttctttctattcctcagcgacaacgactgtcggtttttagtaaatatctatccggtacgaagcccggcctcttggtattgaatgatgtgtctttcgaccaaaaaaataaccgacactttaaaaaaaagcgtcggctagtctctggttttcaggccgcatattttgcaacaaattcaatggcgttgacaagatgttatgaagttcattgcgtaagcataatttttaacgtgctaatatctatacggtttccgtatgataaattgtaaaaatagcactatttgctaatagcgtttcccgccaccatttgccagccaaaccgcaggtggcgtcattccaggcaatccatgcgcgttgacgaggagatagcccgcgcacggtcatgcagaccagctcgccgctgtccagcagaccctgcacctgatagcgcggcaggcacccccagcccagccccaggcgcagcagcgccagctgccccgcggcgtcacacaccgtcagggtctcctgatcgctgagtagcgccccgccctcgccggtggccaccgcccggtaacggcgcagggttcgccagctcaacggtgcgcggtgtcgcgccagcggatgctgtggggcaacgaccagcagcagctccagctcgccgagggggagatagtcataaccgctcagcggcggcggctcgccgagcgcccccagcagcagatcggcctgcccgtcagtcagcggccgccagtccagcagggaggggttcagcgtgaagtgcagccgggtcagcggctgttgttgataaaatgcagcgattggcggcgagagcagcgccacgggaaaggtgctgtccacagccagacgaaggctattttcccacccctgctgcagcttaaccgcccggatctccagttcgcgggcgatatgcagcacctcccgccctttctccagcagcatctgtccgctgggggtaaagcgcgcgcgatggccgctgcggtcgagcagctgaatattgagatcgctttccaggcggtgaatggtgtagctcagcgccgagggcgttttaaagagctttgccgacgcggcggcaaagctcccctctttttccagagcatccaggatcacgaggacatccagcagtggtttcatcgctacccccttacggtatgcgaatcaccgctggcggatcactccatcggcatcaccagcggatcggggtactggtactcaaaccccagctcattgcagatacgattgccatccacaatcttgccctggccgccgtccgggctgtcgctgaacaccggcggcggcagaccgagctcgcgggccatctgcggataaaagaggccgcgcgccggatggcggggcgcacatagattatagatgtgcccgcccttcggggcctgcagcagcagttcgatagcggccaccacatcctgcaaatgcaccagattgaccacgtgctggccatccggcgccgacttgccggcaaaaaaacgccccggatggcgggaaggccccaccagcccggccaggcgcagaatatccaccgatgtccccggcaggttgtgcagccagtcctccagctccttgagcacctgtccgctggcggtttgcggcagacgcggggaattctccttcaccgtaccgttgacgttgccatacaccgaggtggagctggtgaagacgatccgcggaatatggtacgccagcgcggtatcgacgatctcctgcaccgcctgtagataaaacccttcccctgccccggtacgccgggccggcagggtgatcaccagcgcatcgacgttcatcagcgcgtcgaggtcctcggtatcacagaccagctgcggctccaggcgcagcggatagctgtcgatcccgcacatccgcgccgcctccacgccatcctgcgtagttttactgccggtgacctgccagcctcgcgccgtcaacgacagcgccagcggcatccccagccatcccaaaccgactatcgcgacctttttcatcccaggctcctgactctttcgctgtgctgattacaggctacgccagccagcggcaactgacaatttcttcgctcaatatgaaatgaattaatgatagaaaaaagcccttgctttctgcggcggaagtggtttaggttaaaggacatcaaatgcatagtcattcacagagaatttttatgaaccgcgttcaatttaaacaccaccatcatcaccatcatcctgactagtctttcaggcgatgtgtgctggaagacgtttggatcttccagtggtgcatgaacgcgcagagagcccccggaagattcacttccgggggcttttttttggaccaaattcggacagattcagacaggtattcagaggaaaagaacaatgttagacaacacccgtttacgcatagctattcagaaatcaggccgtttaagcgaagattcacgcgaattactcagccgctgcggcattaaagtcaatttgcacacccagcgtctgattgcgctggcggaaaatatgccaatcgatattctgcgcgtgcgtgatgacgatatcccgggcctggtgatggacggtgttgtcgacctcggcattatcggcgaaaacgtgctggaagaagaactgctcagccgccgcgcccagggcgaagacccgcgctacttcaccctgcgccgtctcgacttcggcggctgccgcctgtcgctggcgactccggtggatgaagcctggaacggcccggcggcgctggacggcaaacgtatcgccacctcttatccgcacctgctgaagcgctacctcgatcaaaaaggtatctcctttaagtcctgtttgctgaacggctccgtggaagtggcgccgcgcgccggcctcgccgacgctatctgcgacctcgtctccaccggcgccactctggaagctaacggcctgcgcgaagtggaagtgatctaccgctccaaagcttgtctgatccagcgcgacggtgaaatggccgacgccaaacagcagctgattgaccgcctgctgacccgtattcagggcgtgattcaggcccgcgagtcgaaatacatcatgatgcacgccccgaccgaacgcctggaagaagtggttgccctgctgccgggcgccgagcggccgactattctgccgctggcaggcgacaagcagcgcgtggcgatgcacatggtcagcagcgaaaccctgttctgggagaccatggaaaaactgaaggcgctgggcgccagctccattctggtgctgccgattgagaaaatgatggagtaatcggccagccggtcacgggacacacaggggaatacaatcatgagcttcaacacaatcatcgactggaacggctgtagcgcagaccaacaacagcaactcttaacgcgcccggcgatttccgcctccgacagcatcagtaaaacggtgacggagatcctgaataacgtcaaagccaacggcgacgcggcgctgcgcgaatacagcgcgaagtttgataaaaccaccgtcgccgcgctgcaggtgagcgaggcggagatcgccgccgccggcgagcgcctcagcgatgagctgaagcaggcgatggcggtggcagtgaaaaacatcgagaccttccacaacgcgcaacagctgcaggcggtggatgtcgaaacgctgccgggggtgcgctgccagcaggtcacccgtcctatcgcctccgtcggactgtacattcccggcggctcagcgccgctgttctccacggtgctgatgctggcgacgccggcgcgcatcgccggctgtcagcaggtggtgctctgctcgccgccgccgattgccgatgagatcctctatgccgcgcagctgtgcggcgtaaaaaccatctttaacgtcggcggcgcccaggccatcgccgccctcgccctcggtaccgagtcggtgccgaaggtggataaaatctttggcccgggcaacgcttacgtcacggaagccaaacgccaggtcagccagcgtctggacggcgcagctatcgacatgccggccggcccgtcggaagtgctggtcatcgccgacagcggcgccaacccggactttgtcgcctccgacctgctgtcgcaggcggaacacggcccggactcgcaggtgatcctcctgaccccggacgccgacatgggcagccgcgtcgccgaagccgtggagcgccagctggccgcccttccgcgcgccgaaactgcccgcgtggcgctctccgccagccggatcatcgtggcccgcgatctggcgcagtgcgtggctatctccaaccagtacggcccggagcacttgatcattcagacccgtcaggcccgcgagctggtggacagcatcaccagcgccggttccgttttccttggcgactggtcaccggaatccgcgggcgactacgcctcgggcaccaaccacgtcctgccgacctatggttacaccgccacctgctcaagcctcggcctggccgacttccagaagcggatgaccgtgcaggagctgtcgcgcgacggctttgccgccctcgcctcaacgattgagatcctggccgccgccgagcgccttgacgcccacaaaaacgccgtaacgctgcgcgttgccgccctgaaggagcaagcatgagcattgaagatttagcccgcgccaacgtccgcgcgctgaccccgtatcaatccgctcgccggctgggcggcaaaggcgacgtctggctcaacgccaacgaattccctaccgccgtagccttccagcttaccgaacagacgctgaaccgctatccggagccgcagccgaaggccgtgattgagagctacgcccgctacgccgaggtcaaaccggagcaggtgctggtcagccgcggcgccgacgaaggcatcgagctgctgatccgcgccttctgtgagcccggcgaagacgcggtgctctactgcccgccgacctacggcatgtacagcgtcagcgccgagaccatcggggtcgaatgccgcaccgtgccgacgctggccgactggcagctcgacctgccgggcatcgaggcgcggctggacggcgtgaaggtggtcttcgtctgcagcccgaacaacccgaccgggcagattatcgacccgcagtcgatgcgcgacctgctggagatgacccgcggcaaagccatcgtggtggccgacgaagcctatattgaattctgcccgcaggcgacgctcgccggctggctcagcgactatccgcacctggtggtgctgcgcacgctgtccaaagccttcgccctcgccggcctgcgctgcggcttcaccctcgccaacgccgaggtgatcaacgtgctgctgaaagtgatcgccccgtacccgctctccacgccggtggccgatatcgccgcccaggccctgagcccggaggggatcgccgcgatgcgccagcgcgtggcgcagatccttgacgagcgccgctacctggtggaacagctgcgcggcatcgcctgcgtggagcaggtcttcgattccgagaccaactatgtgctggcgcggataaccgcctccagcgcagtgtttaaatctttgtgggatcagggcattatcttacgtgaccagaataaacaaccttcattaagcggctgtttgcgtatcactatcggtacccgtgccgagagccagcgcgtgattgacgccttgactgcggagaatgtatgacccagaagtatctctttattgaccgtgacggcacactgatttccgaaccgccggaggatttccaggtggaccggttcgacaagctggcgtttgagccgcaggtgatcccggcgctgctgaagctgcagcaggaaggctataagctggtgatgatcaccaatcaggatggcctgggaaccgacagtctgccgcaggaagcgtttgatggcccgcacaacctgatgatgcagatcttcgcctcgcagggcgttaactttgaagaggtgctgatttgtccgcacttcccgggcgacaactgcgcctgccgcaagccaaaaacgcagctggtgctgccgtggctggaagagggcgtgctggataaatcccacagctatgtgattggcgaccgggccaccgaccttgagctggcggataacatgggaattaccggtctgcgctatgaccgcgagacgctcgactggccgaccatctgcgagcagctgacccgcagcgaccgctatgcccacgtcgagcgcatcaccaaagagacccaggtggatgtgaaagtgtggctggaccgcgaaggcggcagcaagatccataccggcgtcggcttttttgaccatatgctcgaccaaatcgccacccacggcggcttccgcatggaggttaacgtcggcggcgatctgtacatcgacgatcaccacacggtggaagataccggcctggccctcggcgaagccctgaagctggcccttggcgacaagcgcggcatcaatcgcttcggcttcgtgctgccgatggacgagtgtcttgcccgctgcgcgctggatatctccggccgtccgcacctggagtataaggcggacttcacctatcagcgcgtcggcgatctgagcaccgagatggtggaacacttcttccgctcgctctcctacaccatggcggtgaccctgcacctgaaaaccaagggcaagaacgatcaccaccgcgtggagagcctgttcaaagcctttggccgtacgctgcgccaggcgatccgcgtccagggcgatgccctgccgtcttccaaaggggtgctgtaatgaatgtggtgatccttgataccggctgcgccaacctcaattcggtgaaatcggcgattggccgccacggctatgagccagtggtcagccgcgatccggaagtggtattgcgtgccgataaactgtttcttcccggcgtcggcaccgcccaggcggcgatggatcagctgcgcgaccgggatctgatcgacctgatcaaagcctgtacccagccggtgctggggatttgcctgggcatgcagctgctcggcaagcgcagcgaggagaacaacggcgtcgatctgctgggcattatcgaagaagaggtgccgaagatgaccgaccacggtctgccgctgccgcacatgggctggaaccgggtgtatgccaaagctggcgatcggctgttccgcggcattgaagaaggcgcgtatttctacttcgtgcacagctacgccatgccggtcaacccgtacaccatcgcccagtgcaattacggcgaggcgttcaccgccgcggtgcagaaagataacttctttggcgtgcagtttcacccggagcgctccgggagcgccggggcgcagctgctgaaaaacttcctggagatgtgatgattattcctgctttagatttaatcgacggcaccgtcgttcgtctccatcagggcgattacggccagcagcgcgactatggcagcgatccgctgccgcgcctgcaggcctatgccgctcagggggcaaaagtcctgcacctggtcgacctgaccggggcgaaggatccggcgaagcgccagatcccgctgctgaaatcgctggtcgccggggttgacgtcccggtgcaggtcggcggcggcgtgcggaccgaagcggatgtcgcggccctgcttgaggccggcgtcgcccgcgtggtggtcggctccaccgcggtgaaatccccggaggaagtgaaaggctggttcaaacgctttggcccagaacggctggtgctcgccctcgacgtgcgtatcgacgccgacggcaataagcaggtggcggtcagcggctggcaggaaaactccggcgtgacgctggaggagctggtggaaagttatctgccggtcggcctgcagcacgtgctgtgcaccgatatctcccgcgacggcacgctggcaggctctaacgtctcgctgtacgaggaagtctgcgcccgctacccgcaggtggcgtttcagtcatccggcggcatcggcgatctcaaagatattgccgcgctgcgcggcaccggggtgcgcggcgtgattgttggccgcgcgctgctggaaggtaaattcaacgtaacggaggccattcaatgctggcaaaacggataatcccctgcctcgacgtccgcgacggccaggtagtgaaaggcgtgcagttccgtaatcacgagatcattggcgacatcgtcccgctggccaagcgctatgccgacgaaggggccgacgaactggtattctatgatatcaccgcctccagcgacggtcgggtggtcgacaagagctgggtgtcgcgggtagcggaagtgattgatattcctttctgcgtggcgggcgggatcaagtcgctggaagacgcggcgcagatcctctccttcggcgccgataagatctcgattaactcccctgctctcgccgacccgacgctgatcacccgccttgccgaccgctttggcgtgcagtgtatcgtggtggggattgatacctggtttgatgcagagaccggcaagtatcacgtcaaccagtataccggcgacgagagccgcacccgggtgacgcagtgggaaaccctcgactgggtggaggaagtgcagaagcgcggcgcaggcgagatcgttctcaatatgatgaaccaggacggggtgcgcaacggttacgacctgcagcagctggcgaaggttcgcgcggtgtgccacgtcccgctgatcgcctccggcggcgcgggcactatggaacacttcctcgaagccttccgcgacgccgacgttgacggcgcgctggcggcttcggtattccacaaacagattattaatattggcgaactgaaagcgtacctggcggcacagggcgtggagataagggtatgttgactgaacagctggactgggaaaaaacggacggcatgatgccggccatcgtgcagcacgccgtatccggcgaagtgctgatgcacggctacatgaacaaggaggcgctggagaaaaccgaagccaccggcaaggttaccttttactcgcgcaccaagcagcggctgtggaccaagggtgaaacctcgggccatgtcctcaatgtagtgagcatcacgccggactgtgacaacgatacgctgctggtgctggtgaacccgatcgggccgacctgccacaaaggcaccaccagctgcttcggcgaaaccggccaccagtggctgttcctctatcagctggagcagctgctggccgagcgtaaacacgccgacccggagagctcctatacggcgaagctgtatgccagcggcaccaagcgtattgcgcagaaagtgggggaagaaggcgtggagaccgcgctggccgccacggtgaacgaccgcttcgagctgaagaatgaggcgtcggacctgatgtaccacctgctggtgctgctgcaggaccaggggctggatctcggggaagtgattgataatctgaagagtcggcactgagaaaacttttttatgaactgaaactgattccgatttacattataccggtaagtaaataattatcatttcctttaagggcattcatcatatatgaatgcccttatcaaatactcatcattataaacaacattcatataagctgtttgcaacagtaaactatactttcaacacgcatttttgatttacgacacactttcagcgtaatcatagctgttttgatatgttgcacatggtctcatccccaatctcagctaaaatacatagcaatcatatataaaggtcagccaataaatatgaaacaaactattttcattttagcgatgagtatttttcctgttactgcattttctgaaagcacgctgatatcgccaatgattggaggtattgacatctgtcatgcctgcaatcaaaaatggaattatcaatacatatgaagcagcaaaatactgccagtcaataaatgaaacctcgtcctcacttatcgaaagaaaactatctgaatttggccctaaaaaaagtaaggatggtaaatttcagataggctatatgctaagtttcccattattatcttatgttaagatgcataatgatggctcgtatgagatcgacaaaggaataatacgctatcgtttaaaattactcccagacacaaaaagacaagctgttatttatcttttctcgaaccacttctccgtttccgagggtgcaaaaactgaagaattaatttctaaaatagatggcaaacacatgatgcaattaagcaatggcatagttcctgtcgacaactatttttccagcaaaacatatccatgggcaattaatgcaagcaactcattaagtgataagatacgcaaagacgcaattaatgaggttttatcgcaagtctgcgctttagatatagtagaccaacaaaaaattagagcagtgaccgtccctggtgaagttcattataccttccccgactttttcaatggaatgggttactgtggtgaaatgcaactcacagattactcagaaaagtcgattaaaagattcagaaattacttatttgataaatataaaaatataaaatcactcaatgatacacttggttcagaatatagatcatttaatgaaatcaacccatcatcaaaaaatataaacactgtgcatctgaataacttttttgagcaccttgattatgcttcatcgggaaggttagcaatatatggttgggcagcaggaaacggtcaaggtccagcaaaagtcaggatttttatagatggaaaagatgtggggtatgcagaaagcgggctcagtcgaatggatgtatatcaggccatcccaacattgggcacttcagctgtagggtatcgatattatcttgattttcgaaagatgagtaaaggaattcatgttgtagatgtcgtccatgacgataatgggaaattgacattgatgaaaagcatagatgtgccggtaatggatcgacaacaaacaaaacctgttcgtgtcggagaaggcataaagttgctcgaagagaaaagcatgaagttctggaatgattatcctgagacattacaaccagtgtattacaatccattgtccgaggaattttataactttagaaaaaaagaggtagcaagagagatacaaaaatatgcagatattgtaagctcatcatgcattgggagggatagaaccttttctcaccaaatagcgccaatgtttaatgcagactggaatgaggaaaaaattgcagttgaagactcacttaaaaagaataatcattataacattggattaaatgcctgtggttcagcattttatggtgactatatatttaactggttaaaaacgtctggaattgaaagttatggaatcccagaagtgcaccctatggttgaaaacgaagaaatcatctatgatgcattggaacatcatcataacaatggtgcaatattcattagcccttactatttagaaatgaaaccagaaagttttggcgtcgataaagaacacaaaaaattcagtatcaatgaaaataacacaaattattattcatcaagtttctatcatgccctaagcagaatcatgaaagaatagtgagcataacattttgtgtcaatcaaataattatagaggctcgggcaagcacaaaatgcttgcccgataggtcactctcttcattcacttttgcaagagaaggaaacaatgcccggccatataacactatctaacctaatttggggtaccaatacttatcgaacaatttcatgtaatgcacgacgcgatagttgtcgtttcacatatcgttgcaaacggtaggggataagtttggttgcccaagataatgcaggattttgccgcaacatccataatacagccaataatttttccttccttccatgaggttgagatattttttcttcagctattgtgatgttctctgaagaatagaaactatctatcaaagttttaaaatcaattctgccaagctcgctttcacgccaccatgaatcacgaatataataatcttgatagaaatgatcaacacgtgtttctgacgaaacatccggcataggatcaacattctgttgctggaaaaagccatcgaaatctgcaatagcttgtcgccataactcactcattctttggaaagatatatcccaattaataatccggctaaattttcgtccgatgagtcgttcgccaaaggcaccaatatttggtacaacaaccggtaacccatattgaagtgctgcactcaacgtataactatatgtctcaggccattgtgcagggaaccacattacatccggagcaatatcattgagttttttctctaaatcctgattagaatacgcaccatggcaaataaccgcatcatttagcgtactacaagcgtagccaagaagatggaactcaatgttttctcttttaagtgcatgcgccacctcatccagcatgaaagcgcccttttcacgactgatagcgccaaggacaaggactttcagtttccgatcacccgtgtaagttttcctgacatcaggatatggagcatttttttcgtaatcaggatgccatgcgatgacagccttctcagaaatatcgggaaaatatcttgtaaaccgaaatttagtatctgccgacgggaaaataactcgctcagccccaaataaccacgcattcatatttgaacgccatgtggcagctgacattccaacaggtaacggatatgtttccgcgcataattcgtccatgtttgttgtattatcgccgataaaaagaccatttttgtcggttagcgatgggtttccatttattgcaaagtagtcatgaattgtgacgtcataggagcattttaaatctaaatgcagttttttgatcttctcagggattcccatcaaatgatggaaatggatatgcgatatacccaaaaagcgtaataatctcagcagatcatcatagccattttcaatatcaacagagatactttctttgcatgtgcgtccgtctgcactcaaagagattactacgctactgttgtctgcattaggctttaaaataaagaagcatgctcttcctttgtaaaaattagacaactcttcgagatgataggttgtcccgccccccatatgatgagaaaccagcagtattttctgaagatttgctttcgccagaatgcgcagtagcattcgctggcgagcttgcttagcaggatctcttgaaataaactccattacatcacgggtatagtttggatgtaattcattaaggagttccatcgcgcgtattttgcgcgggctttgctcgccagcgaaactaactccgcctttgtgataaacaaagacattcaattgatgaaagttaggccaaccggcttttgcagcacgttgacaccagtcattttcctcaccataaccacgaccaaaagtctcttcgtcaaaatatccaacctggtttaagcagtcacgacgaatgtacatacaaaaaccaacacctgttggtatctcgacaagattattttctttgccataagtttcaaattcatcatcgagagcctggacatccattccggaaaataattcattatcttcacagaaatttgggaaactacaaatcgtcgcattatttgaaaatggagttacgctccccacacgctcacgactataagctgcatcatagatacgttccagccatttattagcgacttcaacatcgctatttaagagaagaacatcccgtttcgaatgcagtttcatgccacggttgacggttgcaacgaaacctaaattattttcgttctcgagtaacttgaaactattgtcttgtgcacgtttgcgtagccaatctgtcaattcaggttcaggtgaagcatcattaataacaattaattcagcccatgaggggagggttgatattgctgactctatacattcctgagtttcctgtaaaccaccataaacgggtacgataacatcaaccagtatgtcattattatcattctcagcttgtaacaatttctcttgctgtaactctaactctagtcggctcacaatatcattcaactcaatattttttatcttcaactcttcgagctctttcaagagacctcgctcatacattccattttctacgacatctgtagtagatgttttcatatcaataatgctctgtttttctcgtgacgatagataatataggatatgcttacttaaaatttcatgttcggatggaaaggtcaatcgaaagcggatatattcagcgttaaataataaatcaaatggaactagataagaaaataaatagaaggttagacgttcaactcgctcatcaacatcatcaacattacaaaatgcataagaacaatcccccaaaatcttcacaggaatattcattagcattgcttccagaccgacactggaattaatagttagaatttttcgacatttcttaagaaaatcgatgattgacagattgttattatcaatttcatatccaagattctcatttaatctaaaatggcttcctgggtgcggtcgtactattttttttccaataaatgaaccttcagcatagtccaataaggcttgattatcgaaactattactaaatgcaaggatattggaatcgttctcaacttgcaaaactataccaacatcatattctggttcaatgtagtcatcatcgtttcgactgttaataaaaaaatcacgtaacgctgaaatgcgattttttttattaaagacaacaccttgttgtttagcagcaaagtatctcttctccgcttcagtgttgccattgacaccagaaaaatcgaaataaccagtaaaaagatacgtcggagaacgcagcggacctaattcaagatttataactggaatattatatttttctgctgcagcattcagtgatggacaattgcatatggtcagaatacattcaatgtcgttttgtttttgtaatgcagcgattagagcatttttaaaatcaggaatgatttccgtcagaaatttcttaaaaaggagattactgttatcgccacactcagttaatgcttcagataatgattcttcattaacaatatagacgttgtctttttggcgaactgaaaaattaggaagttcgtagcctaaacgtttctgtccgtcatcagtaacctcccagcgcccctcttcctgccactttgtacagggtaacaaataatcttgtgtcgtaatcaatgccaacggctctttaatagccgtcatggctttatataaaaaccacaaataaggagcttttacaccccggaacggaaatgcgggtaaataaatgccaatcatgatagttcatccccttctataacatttacaggagaatgaataacaccaccaagttctctggatgaccaaaattttacttttgcaattggacgtcgctgatcaagctcctcacgctcaccattattaaaacaagctaaaccgcaatgaacgagataatcaccagtattgataggtagcttaactttatatttaagcttccgaagccccggagccaagtcaatcttatgcccggcaaaaatattattatccccccagatatccccgccttgggtccgagatagtgaaacgcctaagactacatcatttatattttctgatgagtttagcttgaaagaaaaataaatttcttcatttggttttacaagtggcttttcagagagaggagtgccatctgctttcataattgagaaatcttcaattatagctcgaccactaccaaaccgtttttcatcaacttcggcattggtttgcgtattttgtattgcggataattcatcagcagatgcaatttcccccgtctgggaaacagcttcttttttctctgctgtatcagtgcgctctgtcatcagcatacctttctcataggcaagaacggcagccaatacatcagtcgtattaccgactaacatgccatcactcattacaaggcagcgatctgcatattctaatatgctacctgtggaatgcgtgaccataatgatggttgttcctttttgtttaagcatttccatgcgcttaaagcacttatattgaaaaccaatatcacctacagccaatgcttcatcaacaatcagtatttcgggatcaatacatgcctgaacagcaaatgccagacgtacatacataccactggaataggtctttaccggttgatcaataaaatcaccaatgtcagcaaaatctaatatctcttgaaatttcttatcaatttccgacttacttaaacctaatacgctaccatttagatatacattatcgcggcccgaaaactctgggttaaaaccagctcccaactcaagtaacgcagccactcggccgttaacttcaatgtcaccgacagttggagtaagcgtaccgcaaatcatttgtaataatgtcgacttcccagcaccgtttcgcccaatgataccaacggtttcgccacgatttatcgaaaatgaaacatctcgtagcgcccaaaactctttaaaatagctgcgactttcacggcgaattacactttttatttttggggcaaagaattgcttcaatctgtcccatggctgggaatatatttgatagcatttgcttaaattagttacctttatcgcgatttgattagaggacatcagcaaatccttttcttgttttctggaaaaacacaaagccaagccaggcgacaatggatgctccaacagtatagagcaaaatacccataaaattaggtactcccccccaaatcaacacagtccgagcctgctcaattataaatgtcaaaggatttagcatgatccaaatatgatatttttcaggtagcgcgctgatagggaaaaatactggcgataaaaacatcaaaaccgtcgttatgatgactgtagtttggctaacgtctctcaaaaatacgcctaaagaagccaaaatccatgataagccgagactgaaaataacaagaggcagaaaaactaaaggaataaatattattgtccagtgtataaaaccattaaatataacaaaagcggttagtaaaaccagtagactaatagcagtatggaataacgcagcaaccaaggatatgacagataacgtctctaaagggaatattactttttttacatagtttgtattatttaatattatctgtggtgccctattgattacctcaccaaaaaaaccatggacgatcataccgacaaataatattattgcaaattgtgttctgctttcatctcctccagtcgaccatctggctttaaataccaccgaaaaaacaaaggtatacacagtcaacatgaataaaggattcaaaaatgaccataaaactcccattactgaacctttatatctgccgataacatctcgcttagtcatttgcaaaataatactacggtgagtatatatactcttaactatgtctaatggagataatgacggtttctgatgtggatttttcattttaagctctgaaataataccaaataaattaacttagctttcttgggatattacgcaatgctgattcgttgtaagcatatcgttttttatcaaaaaaccatccccacttattaaaataggtaatggccgaacgaatatgataccaaagcaacaatttacttttataagatcccttattgaaaacatgaacaattgttgtttcggggcaataatagatcttcgtaagttgtaaagcacgacgacatagatctacatcttccaggtacataaaatagcgttcatcaaagccattcaacttttgtaatagaacattcgtcaaaagcataaaacagccagataccgaaggaggtgaaaataccttatcatactcggcatcctttaactcgtatgtagcatcatacttaatagcagtggtaggaagaaagcgtcttaagaagagattactgggcgttggcaacaggcggcaactatattgacgctcaccattcttatagatgatctgcggggatacaaaattatattcatttatccatgcaaacgatactaatttatctagagactgcttatcaaaactgatatcaggattacatattaaaaaatagccatcaaaatctgaacttgctttgatggcgagattatgtccggcaccaaaaccacagttacgaggagacttaatataactcacttttggttcattcaatgatgcagcccactgacaaccaccattatcaacgaagataattttttcaacgctctcttcatggcataacgagagaagcgtatctttaatatcatcataggaatgattaaataatacaatagaagcaataacttttggcttcattgctttataagtcattaatcgattacctttaggataaattttttattattatttttaaatagccacttgtgatatccataatctaacaagcaaatttatacttatgcgtagacttcagctgtggcaagagtatgtgcctgcagatctttctccgacagcgacagcgcgcagtcgcccagcgccggccagtcaatccctatctccggatcgttccagatgatgctccgctctgactgtggcgcgtagtagttcgtcgccttgtagacaaactgcaccgtgtcactcagcgccataaacccgtgggcgaatccttccgggatccacagctgacgtttattctctgcgctgagcaccgcgcccacccatttgccaaaggttggcgatgaacgacggatatccaccgccacgtcaaatacctcaccttccacgcagcggaccagtttgccctgagcgtgcggatccagctgatagtgcagcccgcgcaatacgcctttctgggactgggagtggttgtcctggacgaattccacctggcggcccaccgcctcattaaacaccttgctgctgaagctctcaaagaagaaaccccgcgcatcaccaaacacgcgcggttcaaaaatcagcacctcaggaatatctgttttaataatgttcatcttttgccacccgtttatttacccaggacttctgttaccacgcgagccacaccctgacgccagtccgggagagtcaccccgaatgcctgctggaatttttcattcgacaggcgagagttgagcggacgcttcgccggcgtcggataggccgtcgtcggaatgcccttcacttcctgaaccgccagctcggcaccgtgcgctctggccacctcaaacacatagcgggcgtagtcgcaccagctggtctcgccgctggccaccagatgataggtgccggccagcgccggatcacgcagcgtttcacggattgccgtcgccgtgcagtctgccagcagctctgcgccggtgggcgccccgtgctggtcgtcaatgatggagagcgtctctttctcacccgccaggcggagcatggttttggcaaagttggcaccgcgggtggcatacacccagctggtacggaaaatcaggtgacgcgggttgccctgctccagcgccagttcaccggcacgcttggtttcgccgtagacgttcagcgggccggttgcctcatcttcccggcgataatgactaccggcgccgtcgaacacatagtccgtggaatagtgcaccatcagggcacccagcttcgccgactccgccgccagcaccgccacccctttgtcgttcagcaggtcggagagctcccgctcgctttcggccttgtcaactgccgtgtgcgcggcggcattcaccaccacgtccgggcggacggtacgcacggtctgcgcgataccgtccagattagtcagatcgccgcacagctctttatcaaagtaatccaccgcgaccacatcaccgagcgtggacagggagcgctgcagctcccagcccacctgaccattcttgccaatcagtaatatcttcatcttgttattttcctttactggccgtgcggcttcagtcttcactgagcagacgtttcaggtaggcaccgtactcagttttcttcagacgctccgcctgagccgccaccccttccgccgacagccactgattacgataggctatctcttccagacaggcgaccttcatcccctggcgcttctcaatggtatgaataaactgagaagcttcaatcaggctgtcatgggtgcccgtatccagccaggcaaatccgcgccccagcagttccacctgcaaatcgccgcgctccagatacatctggttcagggtggtgatctccagctcgccgcgctcagaaggcttgacgtccttcgccatctccaccacattgttgtcgtagaagtagagcccggtcaccgcccagtccgatttcggcttcagcggtttctcctcgatggacagcgccttaaagttctcgtcgaactccaccaccccgaaacgctccggatccagcacctgataaccaaacaccgtggcaccggaggtcttcgccgccgccgcttccagttttttaccgaagctctggccaaagtagatattatcccccagcaccagggcgcaggcatcgttgccgataaacttctcgccaatgataaaggcctgcgccagaccgtccggcgacggctgaatggcgtagctgaagttcaccccgaactgcgacccgtcacccagcaggcgctgaaaggaaggcatgtcgtcaggcgtggagatgataaggatatcgcgaatgcccgccagcatcaggacagacaccgggtagaaaatcatcggcttgtcgtagataggcagcagctgcttggagacgccctgggtgatggggtataaacgcgtgccggagccgccggccagaacaatacctttcatctttacttccttattagttattcagaccaaggcgctcaccggcataggagccgtccagcacgcgctgccaccaggtctgattgttcaggtaccagtgcacggttttctcaatcccgctctcgaacgtctcctgcggcacccagcccagatcgcgctgaattttcgcggcatcaatggcataacgcaggtcgtgtcccggacggtcggtgacaaaagtgatcaggtcagcaaagtgggtgatgttgcccggcttctgcgccaccactttgtcgagaatggcgcagatggtgcgcaccacatcgatatttttacgctcgttatgaccgccgatattgtaggtctcgccgctcttgccttcggtcgccactttgtacagcgcacgggcatggtcctcaacatacagccagtcacggatctgctccccgttgccatataccggcagcggtttacccgccagggcgttgagaatggtcagcgggatcagtttctccgggaagtgatacggaccatagttgttggagcagttggtcaccaccaccggcaggccgtaggtgcggttccaggcgcgaaccagatggtcgctgcccgctttggaggcagagtacgggctgctcggagcgtacggggtttcttcggtgaacaggtcatcggtgccgtgcaggtcgccgtacacctcatcggtggagatgtggtggaagcggaaggcctgcttctgcacgtccccaagtccggaccagtagtgacgggccgcctccagcatagtaaaagtgccgatcacgttggtctggatgaaggctgccggaccatcaatggaacggtccacatggctttctgccgccaggtgcatcacgatatccgggcggaactcgctgaactgggccgccacggcagcagcatcggtgatatcagtctgggaaaacgagtagcgttcgctcccggccaccggcgccagggattcgaggttgccggcgtaggtcaggcagtccatcacgcggacttcatcccgggtattttcaatgatatgacgaaccacggcagagccgataaagcctgcaccgccggtgacaagaatcttcatactttctctcgtttttcaatgacttaaataataaattctgtaataacaaaaaacgcaggcacgctaccgccattggctatcgcaaccaaaatgcgtggtgcctcagtaaagtgtatttaacatgagctaagatcagcgttccgcgctgcctcatcatggtacaaaccagcccaaccgcggtaactttgcttgcttcagcgtacattcgctatcaggactttcccaaacacaacaaggtacgtcatcgagacgaaatgtgaatgtgtctttaaagcacctgacaatcgtcctttcaaacgccattcagcgattggtctcatgacaaagccatgcagtcaccattatggcgagcaacatactccacagtgaatagtaccggacgaggtcgcgacgcattatagcgctggtcatgaagaataaaaatcaaaaagcggtttgaatcaattcaaggcatgaatgaaacgttttcaatacaatatcaaaaaattcaatcacttgtccacacatcattcgattacaagctatctctggtgacaaccacactaattaattcgtatttcacgaatagatataccacttcgttcggaaattcgtgatgtgttttatcgtgatagcagtatcccagggactggccgccctacaacagacattatggataagctatagacatactcaatgataacaccataaatgaatatcatttgcattaagtagcaattaagcactacagcgccactacaactcacatcctgcaactgtaaagcaagtgatcccaaccgcaagccagtgtaaaatcggcacttatgtagaacgggatatccacaccccggaggaaaaatatgaagtttttggtcactggtgccgcaggttttatcggcttccatatcgcgcagcgcctgctgaatgaagggcataatgttgtcggaatcgacaacatgaacgactattatgacgtcagcctgaagcaggcccgtctggatcgcctggcatatccggcattccatttccagcagctggatctggccgaccgcgaaggtatggcaaagctgttcgccacagagcaatttgatcgtgtgatccacctggccgcccaggccggtgtgcgctactcgctggaaaacccgtatgcctacgcagacgctaacctgatggggtatctgaacattctggaaggctgccgtcataccaaggtgaaacacctggtgtacgcctcctccagctcggtttacggccttaaccgtaaaatgccgttctccaccgaagattccgtcgatcatccggtctccctgtatgccgccaccaagaaagctaatgagctgatggcgcacacctattcccacctgtacggcatcccgactaccgggctgcgcttctttacagtgtatggtccgtggggtcgcccggatatggcgctgttcaagttcacgaaagcgatgctggaaggaaaaagcatcgacgtttacaactacggcaaaatgaagcgcgacttcacctatatcgacgacatcgtcgaggcggtggttcgggtgctggatgtgatcccgcaggccaatgccgactggaccgttgagagcggttccccggccaccagctccgcgccgtacagggtatataacattggcaacagctcaccagtggaactgatggactacatcactgccctggaagaggcgctggggatggaagcgcagaagaatatgatgccgatccagccgggagatgtgctggacaccagcgcagacacccaaccgctgtatgacctggtgggctttaagccgcaaacttcagtgaaggacggcgtgaagaacttcgtggactggtacaaggattactatcagatctaatccccctgccctgccgcaatcgtcagattgcggcacctcttctatggaacctccgttatccgggctatatgtcgactgaatgcacattcattattttatatataatattttgtgctatagacgctatttttgcctttttactcgcccgcctgaaaccagtttcatccagcctttttcagaaaagcaaatatccgcgcgccaggcactgaaacttttctgatatccagaccaatttggttagcggaaacagcattatatgctgattgataaaaaacattactatctgtaggaattttcctaaatccaggatatgttagagcaagccatgcaacagcacaaaactgatgtattgcttatcaaactaataattcaatcaacatacgccctgtggtagatattatggaaaacctatttttcttagtggtcgctgccatactacttgctgtttccgtttatttcttaatttcttatttaaaagacagaaagaaaacgaaactgacgtttaataaacgcaagtggtaaggcccgatccgtattacaattagattaagataatattaagagataaaaaaatgatatgacagaatgactattcattctgcgttttggcatggccttaaggcaagaaaaaataacgctactcgcgccctgtccctcgttttttcataggacataaataacaaaagcctgcgttgcaggctttgttttacctcccggcgcttatctccggcatctacatcacagtgacggtagctcttcacaaggtaagtttaacttatcggacctgttttcaacccgcaacggcttttgagcaggatcgtaatgtccatcacaatttattgaggttaatctgaatgtgcgagaaatacacgtagtgagggatataacgggggagagaaagaagaacactggcggcagggaaccgccagtgtcagacaggcagaattaatcgttaccaaacagatcgcgggtgtaaaccttgtccgccacatccgttagctcttccgccatacggttagagatgatcacatccgcctcttgtttgaaggcattcaggtcgcgcacgacgcgggagttgaagaactcatcttcctgcatcaccggttcatagataataaccggaatacctttcgccttgatgcgcttcatgatgccctgaatagaagaggcgcggaagttgtccgaaccactcttcatgatcaggcgatacacacccaccactttcggcttacgagcgagaatagaatccgcgataaagtctttacgggtacggttagcatcgacgatagccgcgatgatattgttcgggaccgattcgtagttcgccaacagctgcttggtatctttcggcaggcagtagccgccatagccaaaggacgggttgttgtagtggttgccgatacgcggatccaagcataccccttcgataatctgtttgctgttcagcccctggctttcagcatagctgtcgagctcgttgaaataggcaacgcgcagcgccagataggtgttagcgaacagtttgatcgcttccgcttcggtggagtcggtaaacagggttgggatatcctgcttgatcgcgccttctttcagcagatcagcaaaacgttcggcacgcgcagagcgctcaccgatgacaatacgcgacgggtgcaggttgtcgtacagcgcacgtccttcacgcaggaactccggagagaaaataacattatcaatccctaaacgttctttgatgtcgcgggtgaaccccaccgggatggtcgatttaatgatcattaccgcgttcgggttgatctctgtgacatcgcgaataaccgcttccaccgtagaggtgttgaagtagttggttttgggatcgtagtcggtcggcgtggcaatgatcacgtagtcggcattacggtatgcgtcgtgcttgtccgtggtggcacggaaatttaacggtttttctgccagatattcctgaatctctttatccacaatcggagagatcttctggttaagcatatccactttggcctgtacgatatccagtgccaccacttcgtggttttgcgcgatcaggacaccgttcgataaaccaacataacctgtaccggaaatagtaattttcattcgattacactttaatcagttaactgggtaatggcggctagccacgaatttaaataatgctgtgcgcggttttacgctgagaaggaaggtaagtcaagtcggtcggttgaccaagcttgtaaacgaataaacatgacgagttccatttggaacccgccattttaggaaaaacaacctaattatttataaacttctgcagtggccagagtatgtgcctgcagatctttctccgacagcgacagcgcgcagtcgctcagcgccggccagtcaatccctatctccggatcgttccagatgatgctctgctctgactgtggcgcgtagtagttcgtcgccttgtagacaaactgcaccgtgtcgctcagcgccataaacccgtgggcgaacccttccgggatccacagctgacgtttattctctgcgctgagcaccgcgcccacccatttgccaaaggttggcgatgaacgacggatatccaccgccacgtcaaatacctcaccttccacgcagcggaccagtttgccctgagcgtgcggatccagctgatagtgcagcccgcgcaatacgcctttctgggactgggagtggttgtcctggacgaattccacctggcggcccaccgcctcattaaacaccttgctgctgaagctctcaaagaagaaaccccgcgcatcaccaaacacgcgcggttcaaaaatcagcacctcaggaatatctgttttaataatgttcatcttttgccacccgtttatttacccaggacttctgttaccacgcgagccacaccctgacgccagtccgggagagtcaccccgaatgcctgctggaatttttcattcgacaggcgagagttgagcggacgcttcgccggcgtcggataggccgtcgtcggaatgcccttcacttcctgaaccgccagctcggcaccgtgcgctctggccacctcaaacacatagcgggcgtagtcgcaccagctggtctcgccgctggccaccagatgataggtgccggccagcgccggatcacgcagcgtttcacggattgccgtcgccgtgcagtctgccagcagctctgcgccggtgggcgccccgtgctggtcgtcaatgatggagagcgtctctttctcacccgccaggcggagcatggttttggcaaagttggcaccgcgggtggcatacacccagctggtacggaaaatcaggtgacgcgggttgccctgctccagcgccagttcaccggcacgcttggtttcgccgtagacgttcagcgggccggttgcctcatcttcccggcgataatgactaccggcgccgtcgaacacatagtccgtggaatagtgcaccatcagggcacccagcttcgccgactccgccgccagcaccgccacccctttgtcgttcagcaggtcggagagctcccgctcgctttcggccttgtcaactgccgtgtgcgcggcggcattcaccaccacgtccgggcgaacagtacgcacggtctgcgcgataccgtccagattagtcagatcgccgcacagctctttatcaaagtaatccaccgcgaccacatcaccgagcgtggagagggagcgctgcagctcccagcccacctgaccattcttgccaatcagtaatatcttcatcttgttattttcctttaatggccgtgcgggttcagtcttcactgagcagacgtttcaggtaggcaccgtactcggttttcttcagacgctccgcctgagccgccaccccttccgccgacagccactgattacggtaggctatctcttccagacaggcgaccttcatcccctggcgcttctcaatggtatgaataaactgagaagcttcaatcaggctgtcatgggtgcccgtatccagccaggcaaatccgcgccccagcagttccacttgcaaatcgccgcgctccagatacatctggttcagggtggtgatctccagctcgccgcgttcagaaggcttgacgtccttcgccatctccaccacgttgttgtcgtagaagtagagcccggttaccgcccagtccgatttcggcttcagcggtttctcctcgatggacagcgccttaaagttctcgtcgaactccaccaccccgaaacgctccggatccagcacctgataaccaaacaccgtggcaccggaggtcttcgccgccgccgcttccagttttttaccgaagctctggccaaagtagatattatcccccagcaccagggcgcaggcatcgttgccgatgaacttctcaccaatgataaaggcctgcgccaggccgtccggcgacggctggatggcgtagctgaagttcaccccgaactgcgatccgtcacccagcaggcgctggaaggaaggcatgtcgtccggggtggagatgatcaggatgtcgcgaatgcccgcgagcatcaggacggacaccgggtagaaaatcatcggcttgtcatagatcggcagcagctgcttggagacgccctgggtgatcggatataaacgcgtgccggagccgccggccagaacaatacctttcatctttacttccttattagttattcaggccaagacgctcgccggcataggagccgtccagcacgcgctgccaccaggtctggttgttcaggtaccagtggacggttttttcaatcccgctctcgaacgtctcctgtggtacccagcccagatcgcgctgaatttttgccgcatcgatcgcatagcgcagatcatggcccggacgatctttcacaaaggtgatgagatcggcaaactggctgatgttgcccggcttctgctctacgactttatcgagaatggcgcagatagtacgtactacatcaatattcttacgttcgttatggccgccaatgttgtaagtttcaccgctctcgccctcggtggcgactttataaagtgcacgcgcgtgatcttccacatagagccagtcacgaatctgttcgccgttgccatacaccggcagcggtttacccgccagcgcattgagaatggtcagcgggatcagtttttccgggaagtgatacgggccatagttattggagcagttggtcaccacgaccggcagaccgtaggtacggttccaggcacgaaccaggtgatcgctaccggccttggaggcagagtacgggctgcttggcgcatacggcgtttcttccgtaaacaggtcatcagtgccgtgcaggtcaccataaacttcatcagtagagatatggtggaaacggaacgcctgcttctgcgcggcatccagggtagagtaatagtgacgtgccgcctccagcagggtaaatgtgccgatcaggttagtctgaataaaggctgccggaccatcaattgagcggtcgacatggctttctgccgccaggtgcatcacgatatccggacggaaatcgctgaactgctccgagacggatttagcatcggtgatatccgtctgagtaaaggagtaacgttcgctatcggcaaccgtcgccagagattcaagattccccgcataagtcaggcaatccatcacgcgtacttcgtcctgggtattttcaataatatgacgtacaactgcagaaccaataaaacccgcgccgccagtgacaaggatcttcatatttaatctacctttaatgttaaatacagacttcaagttaatagttataaaagctcagtatattaaatttaatacactagccttactcagactgctgcatcaagaaatatattcagaatagagtatagtcaaattataaaattactaacatttaacgctaaaatataagggaacgcttatgtttatagaataataatccgaaaatcctggggtattcccccaggattaaagcagaatggaattactccatccactcggtatggaatacaccttctttatcagtgcgtttataggtatgagcaccgaaatagtcgcgctgagcctggatcaggttagctggcaggactgcagagcgatagctgtcgtagtaggcaatggcagcagagaatgtcggaaccgggataccgttctgaacagcataagccacgacatcacgcagcgcctgctggtactcatcagcaatctgtttgaagtacggcgccagcagcaggttagcaatgcttgcattctgctcgtaagcatcagtgatcttctgcaggaactgcgcacgaatgatgcaaccggcacggaagattttggcaatctcaccgtagttcagatcccagttgtattcgtcagatgcagcacgcaattgggagaagccttgagcataagaaacgatcttgcccagatataaagcgcggcgaactttctctacaaactcagccttgtcaccagccagttgagcttgcggaccagtcaatactttagaagcagcaacacgctgatctttcagcgaagagatataacgagcgaaaacggactcggtaatcagagacagcggttcgcccagatccagtgaactctggctggtccatttaccggtacctttgttggctgcttcatcaagaatcacgtcaaccaggtatttaccttcttcatcttttttagtgaagatgtctttggtgatatcgatcagatagctgctgagctcacctgcattccattcggtaaaggttgccgccagttcttcgttagaaagagccagaccacctttcagtaaagcataggcttcagcaatcagctgcatgtcgccatattcgataccgttgtggaccattttgacatagtgacccgcaccgtcagcaccgatataggcaacacatggttcaccatcttcagcacgagcagaaattttctcgagaattggcgctaccagctcataagcttccttctgcccaccgggcatgatagaaggacctttcagtgcgccctcttccccaccagaaacaccggtaccgataaagttgaaaccttcggcagacagctcacggttacgacggatggtgtcctggaagaaggtgttgccaccatcgatgatgatgtcgcctttatccagatacggcttaagggaatcgatcgcgctgtcggtacctgcgcccgctttcaccattaacaggatgcggcgtggagtttcgagggattcaacaaactcttgcacggtatagtacgggaccagtttcttgcctggattttcggcaatcacttcttcggtcttttcacgggagcggttgaaaacagagacggtataaccacggctttcgatgttgagcgcaaggttgcgccccatcactgccataccgacaaccccgatctgttgcttggacattacatactcctgtcaggtgtggtcactgcgacacgttcgcagtttaaatgtagtctagcatattagctcaaggtagagagatcgcatagagcaattttagttctattattcaacaggtattatggaatattaattaaacacggctaaagaaaatcaaaataaaacacatcaaagacaacgactctttttacgaattttccctagaacaaatcctctaacaagtgaagatgtaagcataagagataagaaatatactatagctcctgaaaaagcaaaaagaattaaagaaaagatagaatcaatttgacttgaactataaaaataatccagcaaaactaaaaaaaccaacattattaatgtggaaaaaataatagaagccatcttattaaaaaaacaataaatattaccaccaattgtcttcattaaaaaatacataacaggaaagaaattgcatatattagcaatcatgtagcacattgcaaacttaccaatatcgtaattaacgccaataaggaatgaaccaacctgcaaaaatgtacctaaaatacctaaccgcattagggtatccgttcgccctttagccataaaaacagcaccactaatgcttagaactgcttgtaaaattgcggttggccctagccactttaacacatcggatgtaagatgccattgaggtccgaatataatttctacaaacggctgactataaaatgcaagacctgtcattaaaggagatgtaataagcaatacaatgaatgcgcaatttagatacgtatttagaatagtttcattatcatcttgtgttttactcaatattgggtataaggatcgtgttgtaacgaacgtaagactttgcaatgggaaaagcattatcctatatgcaagattataactcccgagcacagccgaagacataaacttgccaataatgaaactatccgcatttcttgaaaaatagttaataaaattaaaaagggaaaggtttgcgctaaaaccaaagatcatcctaacttgttttaactcaataaacttgttaaacgatggtctccactttgaaatataccaaaactgcagcgcagaaatcaaatttagagctatagcctgtccaacaagactataaacaccaaaaccagaataagctaatattaatgcaataatgacggaaatagcagaagaagaaacttcaaccatcgagatttttttaaacgcagactctcgctcaagaagagccaaatgtgcagatgcactacaagataatggaaaagtaatacttaaaaggataagaacatacattaatttaggttgattatataccatggaaataaatggtgacattaatagtataaaaaatgccaatccaaatcccatagtaatattcaaccaaaaaactgtgttaactaaatcatgagataaatcttttcgctgtattatggctgctgatgttcccaaatctctcaaaagaatgcctaggttaactacaactaatgccatagccattatgccatactctgaaggaggaattaatttggctaaatatataatattaaccaactgagctatcattttaaaaaactgggatgacatattccacttagcattagaagctaaactcataattttggaccctaatctatcaaaagtgttcagcacattacaatgctttttttccattgaacctatatatattttggatttttttacctatatttatacagggtgcctctataaatctatatgtgagtgaagaaataaataccacagcaatggtgacaaaaggcataagaattaaatattcagacaaagataagccagagaatttattcattaatataaaaattgaaaagataacacaaccgtgaattaaataaatactataacttatttcaccaagcaaccttgctccttttaaagttaaagcaccaaaaagattatttccacaaacaattgcaataaagaatagcagcaaactgattatgctaaaaatattaaatatacctacccctgagaaaaagacatagattaacaagaccattaaaattatggaaattaatctgttgcgaagaatctctatgagttttatattattctcaagtaacttacagatatagttactaatgccaccaatcataaagaagataaaatatctagagtcaataatagaatggaacttgaaattattaataagaaggagcatacagacgattataattaatgttgtagcaactttattttttaaaataagaaacaggagtggcaaagaaaaataaaatagccactcatactttaacgtccatgtcacacctgccgttattctcttcgcatctgtatagccatttacagaatcaccaacaaaaagcaaccacctaacgatatcttttaaaagctcactatgcggtatttgaatagaaagaccagtaagcaaaaatgaataaaacaaagtaatcataacaacaagaaggtaaaggggcattattctaaaaaatctagaaatatagacagaaaaaaaatcaaaatgtctacctgaagtgatctttcctataaacaaaaagccagtaattatgaaaaaaatagcgacggaaacctgccctaaatcatcaataaataaaatttctggcttttcccatttgccagattctttccatttataaaaaataaaaaagtgatgaaaaaaaacgaataatgataaatatgctcttaacccatcaattgctgtaaagcggcccgaattgattagttctatacctaatttattagaaatatactttataatcactaacgagataacaacagataaaaatactgctaataaaaaaataagtcctatcgtctatcacctcttaaaatagtgcagaatagataaattcatggtttggcattcaaattttttatatttatgtcaataccaatcatgcatttttttctatccgaaactcgattatcaattgaataactggtattttttattttcgagaaattcccggtctgttgatttataaccatataaggcctactacctaaagtatgtacggctaaacaatctcgcataatcgatccaggaccaactaaagtaagctcaactccaccgaaaaattgcccattattaatggcctggcaatgtaacatttgtacattttcactttctttcgaaataattccatgagaaccattcaactcggcaaaacaattgttaaaaatattcccccccccttgggaaacaatacctgcatgataattttttattgtaatgcaatcctcaattttaacaaaagagtccaaatgcatataagaaccactgccataggcattttgtacatcaaatccatcataatattgaccagaagaaaaacaacctttgataaaaacattcgtacaacaactggttgttgatgtccatgatctttttacatattgcgcagttttaatccccgactcaccattattaataaatcggcaatgctttactacaacgttgtctgagccacttaaatatagtccgttattgttacattcatgaaaaatgcaatttatgatgttatgatttttcccacgacaaaatataaacggattaatatcagtagtcgagtatgcccataataatggttccctagtcccattcataatactaataccacctatatggtttccacctctaatattgcagtttataaaattgcaattatcaaagcccgcaacgactacattaccatagtttgtactcaatccttggaccaacaagccatgttgtacactttgagttgaagagcggaaaataatagcacagcctatcatttgtgattgatatttagcagggatgcgtttttcatcattgaaaggcattcggccattaccaataggcccttgctgaattatgttccaatgtgaatcatatataaccgtatatggtactgtatcactaattaacttaccaccattccaaatacttccgccaccatcgataacctccataaaacatccatcgcatttgatagatgcgttcctagcatcaaccacaatagcaccagaaactataattttagaagtaatacgataagttgcattttctctaaaaactatattatttttaattttaaaacatttcgtcatggctaatgtatcgtctgcgataccatcaccgattgcaccaaaaacttcaggtgtcacattcttcttataaaaataaaagtcaacataagaaacctcattaacggaaagctctttaaaatatgacttttggttattccattgactaatggaaactctaactgggatactatagctagtaacttctctatctagcttataaaattttccatttacagatataatttgactgaaagatgaaatagttagatcatctatcgataaatcgccaaaaaaacggagcatcccgttatctatttctttaccaaataccttattcttgtaagaaataaaaacaaaagaagaaatcacaaataaaaaaacacgtcgtgaatatttcctcataaaatcgccttatttacaagaatggacctaccacatacagcgccgaattactccatttatctcattgcgattcaatatattacacttaatatttattacactttcaatatcagcctttgatgataggatattaacatgataatcagcacccttcatataagtatagtcccaaaatggcatggttgaaattattagtaaaattgagagataggcaagtttgaataaggaaaaatgaccatcgcgccctttgctatcaagataattgtccatagataagactaaaactggaggtaagtaatatccaaatcgcagtaacacgggagtcatccttgaaagtgttaaaaaatacacaacacttatcgcactgtatattcggttcttcttctgtaagatttggaataaaaacaacattaacaagaagaatatatacaagaaaaaaaccctagacttcaataaccaatcaacaaagcctccatctgcccatgcatacatggaactatatatggcaaattttggaccaacaacaggtatgaaagaaagataagaagggttatataggaaaaatagaaacagtgctacaaatgttgttgaagtaatggtaaatcgataaaaacttttctgtcctggatttaataaaataaaataaagaaatgtaaacaatgatgatgcatgaaaaagtgacgcaactgatataataactatagcccttaatcgtaaattagaccttaatgcatttaaggcaaaaaggcatatagaaaaagccacaccctgtcttataccttcagaaaaaacataaaaacctaaaaaacaaaataaagtaaaaaaagcaattgctggtgactttgtcttaatacagaatttatatacactaaaataaataaataaaacagttagtccataaaaaatttgaaaatccacgccaaaataagaaaataaactcatacaccacaggtaacctggctcataaaaaaagaagtcataaccaggtgtattaatatttaaatatgaatcataataattcatccaatcgtatccaaatccgaaatttaaaacataaaaacctcctgtaataagaaaaagagagttgaaaataagtttacttcgagaaaaagaagcaataaaaaataaaaacgaaaaaaacaaaaatatcataacttatcctgattagatatatacatgaattttatttttttatttcccggacaaaggctgcaatagaattaacgacaggaaagcaaagcctcatattgtgcttaaaacttgccacttttctcccggaggataaaagtgtttttaaaggtatttttttattcctgttaattaaatcccttataaataaagaacttttcatttcttcacttaatgtttcagaatgtttttcaataaatgatctatatccaatatgggccttacttgatgttgatattctttttctatcattttcaacatccattacataagttgcttcatttgttttaatacatggcccaaatttcattataatgcgataccacaaatcataatcttgccatgcagggaaatttgtatcaaagccaccaacatcttcaaaataagataaacgggttagtaactggtttccaactagattttcataacccatatcaatactcgtaattacaccagaattatttttacctcgcttaagcttgttcccatccttaaatatcaaattagaacaaaccagatctattttacgttcattacaaaccttaattaatgattcaattctatttggtaaaaaataatcatcatcatctagtccagtcaaataatatccagatgctgcagcaatacatctattccggctgaaacatgcccccatagggctatcatttttcaaatatacaaagggaatgtctttatattctttttgcaacttattaaccacatcatcagtattatcgcctgacccatcattgcatataataatttcaatattcttataagtctgattaatcacagatttcactgcattactaagcaactcagcacgattatgagttggtatatatactgaaaccaatggttttttattcatatttttcccatatccttagttcgtaagtcaattacagcgggggtgtttccctaagaaaagacctttaaataaaatcatgaaatagtcaagcttgcagtatttaaaaagcagaagaaaattcttcataaacatgtacgattgccaaacagaagggtagcgtcgtgtagatatcgcagcatcccataaacgctctttaaacctgaaatcattaaatttttcttctgtcaaggataatgaatgcctgatataacaggaagtcttgatatcaaagtaagcacctttatttaataatttcttaagccttttaaagaaagatgaatcaactccatataatgcatatcgttcatcaaataactgcagattatttttataaaactcttttactaaatccctactaataatcaaccctgatgcaattgaaacacagaaaaaattgtatggatctaagtcgccatatttttctgaaattacacctgatgacattggataatatgtcttctcagtttctttactaataactctaggcagctctaaatctgcctttgatgagtgaataatgtcgacaaagctctgagttatttcggtatcatcgtctaatagtataaaatattttgcttctttattcccttctataaactgattatatactaaggataatggcctattatttaaatcattaataacatttactttatcgaaaacattactaaattgtagttttttctcatcgctaataattatttctttcggaccattgttataaatagttagctgagaatttttataatgaaacctcattaaagtattaatcgtttcagactcatcgatagtcttattataaataattactaaaaatgcattataaaacgcattgctcatatttctaccccacttttaccaaagtatcttccaaaataagtcagctgattttccgaggaaaatttaggaaatcgtttttttattgttaatttataaataccaattttgtcatttgccagtaaatcattattttcaggggtcaccgcttttggtaacaaccattctagtaaaaaacgattatcgccatgataaccaagtttatcaatatctgtgcgtaacaattccgaatattcaaaggcaagaagcataagataatcaactaaaaaataatcaattaaaatattatttttttcccaatacttattaaagcaatctctaattaagataaatggtttatagttcggtgggcattttaaaaaatatccagtccaaagacctttagatatactattcacattatcaaaatttttagattttaacgtaaaaaaatcggcgtcagttatgaatgataattctttcgtacaaaatattgtcgcatcaacccaaactccaccatacgtagctaatagattgaatctaagaatatcacttaactgtgcttttgaaataagacctgaagaatacttctcaagaacaatggctggaaaagtcacataattaggaatgttaatatcatcgagaatcactacttcatattcggaaggagcatttgtttttattgaattaatacaatgtttaactaactcaggtgcttcatctattccttgaaaccagcatacccatatatactttttgagagtgcccgcaacatctctattattaacttgtttctctattgatttaatatttaaatttgattttaaaaacctcaatattaaatatttcttaactacgaaaaacttactttttacagtatcaaagggtatccctctcttcataagatcgataaagtttataaaaagcaatagtaatctcaccttaacctctcacatatatgtcattttatatcggatacttcttcatataagtcttgatatgccttagccattatcgccgatgtgtaatttttttcaaaaacatctcttgcaatttttgattgtttatttttgtcaatagaaaagtaatattcatcaagcttttggatataatcttcatagctatcatcaagtttaaatagataaccacaagtttcttggcatttttcgtagacttccttatgtggatcaatatcagaacaaataaagacattgccgatagaaagagactcaagtagagctaatggcataccttctgctttcgatgctgaaacaaaacaatcaaattcggtgagtttgctgattggattatttattttaccataaaaacaaatattctcactttcaaactttttttccaaatgctttcgattttcgccatcaccaataatatgcaatctcgtattctttcctttactccataggtcaaacccctgtaggataaaatcaacgttcttccggttatttaaagaacctagataataaaaatcacaacacttgtcattatctttcaatctcagatcaataaacaaatcatcaacaccattagaaatggaattaattttaaacattcctaattctcgttcacaataaagcttcacagaattagaacacgcaactttcgtaaagcgcgaaatacatttcttttggactaaatataataaaccaccaataaacttacctcgccgaaaaatagaatcttgatcaagataattatgtaacgtggtaaataaacttgcttttggaaatgacaaagataaaaatatatcagctattatacagtgactatgtataatatcaaatttctcttttcttacttggtatgcaaacgttagaaaattcttcctagaaaatattgccacccgtccatatttagaaaactcattaactagatgtccaccacctaaagaaaaaattgatatgtcatattttctattatcaatttccctaactagacttagacacatatttatcggtccagcattactcatatctggtaatacatagagtatttttattttcctcatgtctcatcctgtttataaaaataaaattagcatatgaaaatatatcaatagtcaagtgaataataaagaccagaagaaaaaaatataattttatatagatgtatttatttccaaaatctcttgtgcatactgatcttccttctcatttctaatggaagttttttatagtgcccacctaatttgtaacctacaaacttcatgatattattaatacaagcttgtggtatccataaaaaaccattttttagcaaataagaaaattcagataagataaatcgtttcccttccccagtagcccctccaaactgcgcccttatccatggttcatcttgatggaacactccaatatcaaaataacgcttaaactcttctaatggactatagttatgtgagtgtcttacaattgcgcttggtacgtacgctgatttatagccaccgagtaatgcctttgcagcgaaatacatatcctcgcataatatagtatttgaaggaaaccctcctaatgacttaaatgcagataagcgatatgctgaaaacgaatttgacataaataccgattttagccctaaagaagtcacactttctttactactttcatatttaatatcaggataattaaaatatcttgcatgcttggctatcgcgttagcatccaaatgaggaatttgcttaccataagcgcaaacaatatcaggattattgaatatattaataatgttttcaacaaaaccttccagaggtatagcatcctgagttaaaaaaataaccacatcatattcaccaatatactgctcgacgattttatttctcgtaccaccatgattgaactcagtacttgatatgatatccacatcaaatcctgctgcttttgctattgctactgtattatctgtactaccagaatcaatcacttttacaaatgtatccttcggagcatgcttttttatttctttaactgttttttcccataatgaagaaccattatatgttggaactgcaatgtaaaatttcattcttcacctgttaatatgaatatagaaaatactaatacgcaccatctttcttcagaactacacttattgttttaaacagaatcgcaatatcattccacattgaccagttcttaacataccacgcatcaagatatacacgagtttcgtaatcaacatcgcttcgcccactaacctgccataacccagtcataccaggcttgctcagcagataataatctacctcatcgttataccttattaattcagcagtaatgattggcctcggcccaaccagactcatctcacctttcaagacattgaacaactgaggtaattcatccaaactagttctacgtaggaatgcccctatttttgtaattcgcggatcgttttttaatttaaaagttgcatcccattcttttttcgcttcagaatcactatctagtaatttttcaaggacttctttagaatttattaccattgaacgaaatttgaggcatttaaatgatttaccacctttgccaatacgctcatgcccatatatagaaggaccaccatccctctttactttcctacttatatatattaatgcaggcgaaagaatgataataatggctaaagatccaacgatatcaaaggctctcttaagaatccgcgatgaccattttgcaagattctgttgaacacgaaatatcatcacttcatgactaaaaataaaagacatatctgtactgtcgagaggcatcccacgcaatgttggaataacagagatatatcgatagcctttaatcataaaattacgcaaccaagcattacggacttcgctctggtgcgactcaacggccacaataaattgcgtttttttgtccattgatgataaccagtcaggatcatgtgccagaacaggaacaccattaatgtctttattttccgaacgctccccggttactgcaatgaatcctacaataacaagcccaaggttacgctcactatttattgctttataggcctcttgcgcattagccccactgccaattatccatgtgtctctatgccataatccgaatacgtctaacacccgtttggtcaccatccttgccaagggcaccagtaacaaaacaaaaaaccacgttagtacccacaaatatcttgaaaaggaccagcttgcaaatgccataaccgcaatttcaatgattgcaaaaatgactaatgtacgtaatatttcttttagttcaaaccaaaaggtcttacggtaaaaataatggcgtagtctcattgaataccaagctatgcagcataaacctaatagccaatgaagtgctttccatccttcaagttgattgactgagatgactgtttcataatcgctaattgtaatagataagacacctatcgctaaatataatgaaataacaaaactaaaaaaatcagatattgccaatgctatactgacaataaaattcctgacgagaagcgtcatattcccctctcttttcatttaaccaagccagtttgaaatagaaaaagcaaggacggatattacccgtccttttagtttattaaattttatcggttttccgaattatttgttatccttgtaggaataaccatagtggttatatccataaccataataactacttgcttttttaacaacaccattaagaatgcaaccttttacgactacaccagtttgctcgaagcgtttaataccgacctctatttctttcgccgtattcagctcaaatcgggcaaccattaatgttgttcccgcataattaccaattactgctgcatccgtgacggctaatatcggtggagtatcgagaacaacaatatcgtagttttcactggcccaattcagcagttcaccaaaacgcctgtgcattaataattcagctgggtttggtggagccattcctcgtgaaatataatcaaaaccagctgatgtgatcgtttttattgctttattaatttcaattttacctgacagaatatcagacaggccattggtattgctttcattgaacaacttatgcgtatagcctttgcgcatatcggtatcaataaacaatacttttttccctgtctgagaaatcactgcggctaagttcgaacttacaaaggttttccctgcattagggcttgcaccagaaatcattagcacattatttcttgcctccatcatggcgaaatggagactggtgcgcaaactgcggatagcttcaattgccagatccgctgggttatcaactgccaggaagccctgaatttcatcaacagactttttattccacccttttctctgcaccacacttttcgtaaatttttctgctactgggatacttgcatagacattaataccaagttcttcaagctgctcgggggtttctattcctctacgcaagaaaactctaagtagtacaattcctgcagagaacacaataccgaatataatccctgaaagaacaataaatacttttttcggtttaacaggtttaggttgagtgacggcattatcaataatccgcacattaccaatggcactggatttagcaatatttaactcttgctgccggtttaataattgcatatatacagcacgaccagattctacatcacgacttaaacgcaatatttcctgctgcgtttcaggcatagcagaaacgcgcttattaagcttagctttttcatcttgtagagtctttcttttttccatcaatgctttatacgtaggatgttccttggtatagagctgggatatctctgactcacgaaaagttaattcgttaagctgattatcgacattaactatttgatcaagaacggcttttgcctcaagagataaatcaacggaatcactctttctccgatattggtttaatttatcttcggcctgatccaaatcactacgaacctggggtagttgcttactcaaaaactccagacttttcgcgtcttgtgcggcttgccgtgcaatattctgagctaaatagttttcactaatgctattaagaatacgttcaattaatactggattatcgccggtcaaggagagtgttagcatcccagtatcttttccctgatcagctacggctatatcgtcctgaagatctgttatagccttcaatcgactaacatagacaattgaaaactcagtccctggttttgcgctgatttcatcaactttgagcgaaattccccgctcatcaagtagctctccaactttaccattgataataaagtcacctacggagatagaaaaactatttctctctttaacagttagtatgatctcaggagtatcattatcattttccggtatatacaaccgagaaatagatagactaccaggtttatctcccgataagcgtgcaaaaccacgccctaatagtgggaagtatttttgttttaccctcgcctgcaggttaagatcatcaactgtttttcctaaaatcatccgggaacgaatcaacgcaatttctggggccgattgaggttggctatccggaagcatctggctaagattgctaagtatggcattcgcttgtttctgttcaacctgaattagagcatcagcttgatatataggcgtggcaaaaatagcataaattaatgcgactaatgtgaatagagaagtaacagaaataataagcttgcgatgatctataaactcaccaataaggcgacctaaatcaatttcatccgcatctttagatgtagctttgtttgtaactgatgacatgcgatttttcctgaattatgcacctaatttctgagcccaaagtctaccggcctgctcaataagtttataaactgataagaaggcttcgtcacttttgcgataagggtcaggtatatcgcgttgctccaaccagtgaccaaatagcatcgttttccccctggcttctggtgctatatgcccgatctgctcaatatgggatttttccattgctaatatcaaatcgtattgacgcccaagagaggatgtaaactgcctggagaggtgcccctccaaagaaagcccatggagctgagcaaccttaatcgcactattatcagccgcatgctcaataagtgctccagtccctgctgaatcgatttttttatcaggtaataagtttcgtaaatatcgctctccaatcggagagcggcatatattacctgtgcaaaccacaagaattgaatcaaacatttctatcaccaagtccgaatgaatttacctgtttctgtcatatcatgaactcccgtaatagttggcacaagttgagatataactctattccaacgaaccaatggagctgtagtgacataaacaatatcatacggctgtaactggaactctgtacctaacaccatggccgaagcatcctgagcattaagctgatagatattcgcaattttaccctgactatcatttttaatctgacgaatgacaaacaccccagtagcatcactgaaagcttgtgacatcccctcagcgttacccagagcttccgccaatgtcatgccacttctatccatcttcattgtgctttgcttacctacttcgcccatgacaaatacttttagatcgtcattacgcggcacaaagagaatatcacctggatataacagatgattttgtgtcaaatcgcctttctgcattaatgcatacaatgagacttttgtgtctttcccgttatgtgttaatacaacattccgccagtccgcatctggtgcaagcccgccggccgcgttaatggcatccatcaccgttaatggaatattggtaattggctgctgccctgatttagtaacctcacctgtcacataggctttttgcgaacgaaaagcagcaacactaacatcaacctgtgggctttcaatataggtggttaaacggctcgctatatcctgtcgtacctgagcgagagtttttcccgctacctgcaccttaccaatataaggataaaaaatggtaccatcggagttaacccagttaccagtatcgctggcgctgcggtattggcctgcaggagtagttagttcagggtggtcccatacggtaaccatcagtacgtcaccaaccccaatgcggtattcataattgcgcagtaaattatcaagctgcgggtttggacgagcgagtacagtctccggacgaagctgatcgatcagtcctggggtcattggatacacgttcactaacttatccagatcgtagtcgctgtctggaagctcaaccacgttcttgcgcagactgtttaatccctgaccagggatgattgtacaacccgataaaaacccaatcgctaacgctaatgccgaaaatctaacaagttttttcttcataatgtcacatcatcagtaaatcaaaatttgccaattcctgagcagctgtcatcgccgttgcttacctgccggcttgtggagagataaaaactgactgcctcctgcagcactaccaccctctctcctctattttcagcattcagccttataaactaaacggtatctctatccctgcgctcgccccaacgtcatcgctgtcgctgttgttcgcgtttgtgtaccacaaagaggtattcagacgaacagactgatacacatcgccgctccagcctagctgtacacctttcaaagtatcggcatgggggaatgctttattgatcgactggttctcagggttaactttggcgtaaacgaggcgtgtactccaacgctggttatcttcggtaatcagctcaaccttcccggcaatgagttgaccatccccacccatcgcatcccccagtggatacccttgttggtaataaccatctttatagatgtggtgggtatagctgtaattggttcggctcatgttggtacgcgtgtcatgcgcttccacataccagttaaccgcatctttaccccaaccgtggtgcccttccactccaccaaggaacatattcgcggaaggcaggtagccagactcatcctcgccgaccatttgcccatagaaactcaccggccaccctagagtcggctcgagtttgaatttaaagtcaaatccggccagctggttacccggttcgttatccgtcccggtattatcatggccagtgaagccatcccagaagctgctaaatgactcaggccgcccttccccaccccactgcataatgcgtgacgcgcctaattctaaagactggaatggtgaaaaggtaaaacgaccgccgataattttggcatggggtaccgcggtatattgattcatctggctggcggagatctggtactgccatgggccgacccagcgcaaccaccaagtctctggcgctgcctgctctgcgcgctgcatcaggaaaccggtcatcggccgcatcgcatccccgcggatcaaactaccttcatagccaggcccccaccactgtggtatctggccaaaggagagccactggttccagaacttcaccgcgccataggcgccgttggcgttgaagcgcgatccgttgctgatccgctctcccccttcaacattgccctgaaggtggacgtcccaccactcgccgctgttgttgaacgccaggcctaacgagctatccgccggctgcgtctggccaaacccctgcggagtgcccggctgatctgttgaagtgtagccggtgacccggaaatccgcttttaaggcagacagtctctggttgatacgggccagaactacctgctcagaagaataggacggtttggcctttttcagcgcccgggcaatctcttcctggctgagcggccaggtcgacaggctcagatggatgaccccgcgatcggaaagccaggccaggtcgttacgcaagtcgttgtcatttaccactaacccggctgcgtaagcctgggctcccagggaggaaagcaaacccaacgtcacggcaatgcgcgcaatttttatcattgtacaagatccattttcagccccgctgtcgtatctcaatgagaatgaggggaataccaagatagaaagcgctcgcggcaccagctgacttcgctgtgcaacaccgacgaggcaagtacatttaccctaagctgcttgttagccttataacatccactcagctcacaatgtaggcgaattttaccctacaggctatcgatgagacaggaaagttaatatccaggcgatatcagcagccgctcctggccaacttctgaggatatccgtagaaaactgatagatatctagtgagggcgatcatcctgaccgggacgatttttcagccgttgaagagaacctctgtgcaacagcaagcggcttcagcgacgctaccgcccctggcttaacagctaccagtgcactgactacctgaacgacttaatttttatcgacctgtgaatgaataattggtcaggccattatttttggcggcgttaagtttacgggatttcggtcacaattgggagtgttgttaccgaatatctgccaattaatgccacctgtcgttctactgacaaaaaataagcgggtcaccaattaagattattcactgatttccagggttagaaatcttcccggtactgctacaacatcacacatgcagctaactgactgtaaaaaagcgtctttttccatagctcatcatcatgcaaaaatcagatgatggcgttatagtcaactacaatttctaatagtttcctgtgtctggatattcattgaatgtgcatcaggtaacgtctcagcgcatttaagaaacgtctgatcaaagctatatccaggcaaatattcaataacaatgtagtagcacttcattatttcataaatatgaattatcaattaccggatatatagtagattattttcttatttgtttaattaaccggcgaaaacttaatttcccctgtaaaacaaatggcgattaccaggcctgcttgtgcagatcggtacgcgtaaagggtttatccagcggccccaccgcggtggcgatttgtcccagcagggactgagtcggcgctttgctaccgctatgtaaaaggataagtggaaccatcaccaggcatgcgacaccgccccatgagatattcacgctttccggatcagaggtacgtttttgcaacaccaggaacaaagcgctgccagcagcgcccagcagcaggccggcaatcacttccgagacggaatgcgcatggatgaccagccgcgaatagcccaccacggcggccagaacatagccggtaataacggccactttacgcagaccgacggagatacgggcgctgagcagccacaggaagataggccagaaggccgcggagagcgcggagtggccgctgaagccggtgtaatccagctcgcgaatacccagaccccagcccataaaggccagtttggaggcgcagacgatagcgccggtgatgccgaacagcaaactccattgccacgccagcaaccgcgacgttttacgcagcatcaggacaataaacagcgccgctgcgctgggcagcaaaacagtgctatcgccaaaaaatgagatgagttgccagttcatatacctgtgatccttcgatgatgtccactgccgtgctcagggattatccgtaatgtctgtaccagctcgcatgccaattcatttcacatttttatgcatgcaagtgagatgtttaaagcggaaacatgatcgcagtcaagttttatttttggctgtcgttgaccgctttcccttcgctttaggaattgtcgcactaagtgactattcataaagcattattgccgctactccgaccattgcaccacagaggccagaaacaaactaccagaagtctccgaagccatacgtttctttacaatcgttataacattcgcgttatgaataatttctgcataacgttatgagcgacaggacgaatgttcacgccctgcccccccgtactacgctagcaatcaggccagcagttttttaatactttcgcggaatttggcgccttctttcaggttacgcatcccgtaggtgacgaaggcctgcatgtagcccattttcttcccgcagtcgtagctttcgccggtcatcagcatcgcgtcgacggattgcttcttcgccagttcggcaatggcgtcggtcagttggatacggccccatgcgcccggctcggtacgttccagttcggcccagatatccgccgacagcacgtagcgccccaccgccatcagatcggagtccagggtctgcggttcgtccggtttttcaataaactcgacgatacgcgccacctggccttcagccaccatcggctctttggtctggatgacggagtattcggagagatcgcccggcatacgtttcgccagcacctggctgcggccggtctcgttaaagcgggcgatcatagcggcgaggttatagcgcagcgggtcagcggtgccgccgtcaaggatgatatccggcaggaccaccacaaacgggttgtcgccgactaccgggcgggcgcagaggatggagtggcccaggcccagcggctgcgcctgacgcacgttcatgatggtcacgcccggcgggcaaatggcctgcacttccgccagcagctggcgcttcacgcgctgttccagcagggcttccagctcgtaggaggtatcgaagtggttttccaccgcgttcttcgaggagtgcgtcaccagaacaatctctttgatcccggcggcgacgatttcgtcaacgatgtactgaatcattggcttatcaacgatcggcagcatctcctttggaattgcctttgtggccggcagcatatgcatgcctagtcctgcgaccggaataaccgctttcaaattcgccatattcatcttcacctgtttggttgcaaaacacgcggttttgcaaaattgtacatgtcacaaatccattgaaactgataatacacggatactgcccgggcatctgcccgccaaattcttaaattcactgtcacgtaaaagaatacacacaactcccttttaccaacagttagaagtgagaataatcttattctcgttcaggttattcagcggctcgttcctttgcgccgcgcgatgtggctgagaggcccgtccatcagagtctgtaggccgccggacccgccgcgccgcgcgtatgcccggaaagaatagatagagataataaatttcgccaggcaatatatttcagcataaacagccggatatgacgacatattagcctgaatccgcggcggtgaactgcgatccgccctattctgcactcacttcataatatgaattatgccggttttgtgagcgggcttcgcgcttcgcttctgctctgcgcatccgcgctcgccgtgacgatccgcgggaggaggcccttttgccgccctcgctgaaacgcagcggaaaaagttctgatatcggcaagcttattccatggtcgccgccatggtgttattttttcactgttcttttccggaacataattcttatcggttcgcttaatccgctggaaatatatccacccacggcagggcgatatccgcgtcgttattgcattttagactcatcttatccatgatcgtggtaacacataccgcagtcgtacaggttttaatgcatatggaatggattgccgatccgtcaatctgggcaggtctcgtcacgctggtggttatcgaactggtgttaggtatcgataacctggtctttatcgctatcctcgccgagaagctccctcccgcccagcgcgaccgcgcgcggatcactggcctgatgctggcgatggtcatgcgtctcctgctgctggcttctatctcctggctggtcaccctgaccaaacctctgattgtttttcacgacttcagctttagcgcccgcgatttgattatgctgtttggcggcctgtttctgctgtttaaagcgaccgtcgagcttaatgagcggctggaggggaaagacagcgataaccccacccagcgcaaaggggcgaaattctgggccgtcgtggcgcagatcgtggtgctcgacgccatcttctcgcttgactcggtgatcaccgccgtcggcatggtcgatcacctggcggtgatgatggccgcggtggttatcgccatcagcctgatgctgatggccagcaaggcgctgacgcgcttcgttaacagccacccgaccatcgtgatactctgtctgagcttcctgctgatgatcggcttcagtctgattgctgaaggcttcagctttattattccgaaaggctatctatatgcggccattggcttctcggtcatgattgaagcgcttaaccagctggcgcagtttaaccgccgtcgcttcctctccgccaatatgacgctgcgtcagcgcactaccgaggcggtgatgaatctgctgagcgggcagaaagaaaaagctgaactggatgctgacacggcgtcgctggtcgccgatcaggatcaacatccactgtttaatccgcaggaaagactgatgattgagcgggtgctgaaccttaatcagcgcagcgtcagcagtattatgacgtcgcgccatgatatcgagcgcatcaacctcagcgcgccggaggaagagatccgcagcctggtggagaaaaatcagcatacccgtctggtggtcaccggcgggaaagataatgaagatctgctgggggtggtgcatgttattgacctgctccagcagtccctgcgtcaggagccgctggatctgcaggcgctggtgcgtcaaccgctggtcttcccggagggcctgccgctcctctcggcgctcgagcagttccgccaggcccgcacccattttgcctttgtggtcgatgagtttggttccgtcgaggggattgtgaccctcagcgacgtgatggagaccatcgccggcaatctgcccaatgaggtggaggagatcgatgcccggcacgatattcagcatcatcaggacggttcatggacggtcaatggccatatgccgctggaggacctggtgcagtacgttccgctgccgctggatgataaacgggagtaccacaccgtcgccggtctgctgatggagtatttgcagcatgtgccgcaggtgggggaaaccattgagattgacggttatacgctgcgcacgctgcaggtcgacagccatcgggtacagaaggtgcagatcgtcccgccggtaaagcaggatgagctggattatgaggtgtaatcgtcaggcataaaacggcccggggtatcccgggccgtaaaattgatagccaggtatcctgtttaatgcctgatggcgcttcgcttatcaggcctacgggatggcgaactaatcggggtatgacacccaccgtataatccaagccgggtcaggcgtagccgccacactgcctgatggcgctgcgcttatcaagcctacgggatggcgaactaatcggggtatgacacccaccgtataatccaggccgggtcaggcgtagccgccacactgcctgatggcgctgcgcttatcaggcctacgggatggcgaactaatcggggtatgacacccaccgtataatccaggccgggccaggcgtagccgccacactgcctgatggcgcttcgcttatcaggcctacattaagtggcgacgcaaacggatgatattgcgcacatcccaggccgggtcaggcgcagccgccacccggcatcattgtgacattacgctttgacgataaacacagcccggaaacttccgggccgcggtggtaggaattacagcttatcgagcagctttttggcatcgttgccgtctttgctgcctttattacgctcaacccagtcgttgaggcgctgcttcgcttcatcctgcagctgtttgcgcaggatctggtcgacctgcagactgtagctcagcgactgccactcgccgtagatgcgcagcgggatagcggtctgtttcaggcggtcgataagcttgccctcccctttccagccgccgagcacgcgcacgttgaagcgcatatcgcagttctctttctgcagatcgagctgtccttcgccggtcatcgccatcacgtcggactgcccctgcaggcggttcagcgtcaccagcccgttatccagcgtcagccggctgctcacggaatccaggcgggtggcattgtcgtaattttcctgcgcccgcacgttggtgctgcgctccacggcctgctgcaccagctgctggaagttcagcccttcggtgcgggtatcggccatctggagctgagcctgtccctgccagtggcgacggaaatcatcggcgtcaatgcgcgttccggaaaattcgccgctcagcgacagcttgccggtcaggtttaaggaatagttaaaggctttgatcagcgaaccgatctccacattctgcagcgccggctggaacgtcgccagcggcgtgtcgccgcgggcatccagggtgccagggagagagagctgcccgccatcaagattgccctgcattttgctgaccgtcagcagcccctgctggttgctgatttcgctctgcacctgggtgaagttcagaccgcgccactgcagctggtcggcgctcagggccattcggccgttgaagccgcgcaggctctggtaatcttcgcgctcatcgctgtcggcgatcaccgggcgcagcggtcgcgtctgactctggccctgctgactggcgctactgtccgtcgccggcgacctttgcgccagcagactatcgagatcgagagtggtggcgtgcaaatccagcgaccagtccgggcgatcccccagcaccacgctgccgctgccggtaacggtgctgcggttagccatcagattcaggttgtcaaaacgcagggtcttgtcatcttcctgccagctggcctgcagactcccctgaccattaatgccgtccggtgggagctcggcgccgcgcagctgccagctaagctgggtaaagtcggcttttaaggagtgcggataatcgccgccctgcacggtggcggagaagttcagcgccaggtcgcgctggtcgcggttcacccggccggagaaatccacggtggcccggtgattctcatcctgctccatctgcagacggatatcgcgcacggtcacctgctcgccgttctcgtgctggaagaagagcacgctgtcggccacctgcagctgacgcacatcgtaggaccatccgcgatcctccggggccagcggcagggtgttgtcatgcggcaccaccggcgctgagctgtcgcgaaccgcctcggttttcggggtcagctggatcaccgcgcccttgagcatcacctgcttaacctgcagctgatgcgagagcagcggcagcagcgccacgtcgaggcgcatattgtcggcgcggatcaccggctcttcggcgcctcgggcggtcagcgtcatccgtccgctgagaatgctgagctgcggccagacgtgccagcgcagcgggccatcaaggtcaagctgataaccgctgcgctctgccacctcatgcaccatataggcgcgaaaatcgttgggattgaccagcaataccaacgaggtaagcccggcgacaatgaccgccagcaggatcatcagcgttgtcagtattcgtctcatggcaccctcagcaacaccccgttgacgttatcaatccttgtcgattcggctcgccaccgcgccctgctggtcgcgatatttggcgtcttcacggcggttatacggccgggccgccgggcccgataacggttcaaagctcagcgcgccgatgggcatccccgggcgcagcgccagcggcaacttgccggagttgtaaaactcaagcacgatgcagccggaccagcctggatcgatacggtgcgcggtaacgtgcaccatcagccccaggcgcgccagcgaggagcgtccgtccagccagcctaccaggtcggcaggcagggtgacagactcgtaggtcaccgccagcgccagttcgcccggatgcaggaaaaaggcttccccttccggcaggacgatctcttcgctcatcacccggtccagcgcggcgctgacctcggccttcgggccgcttaaatcgataaacggcgccgtgtggccacggaaggtgcggaatttattacccagccgtacatcaaccgtcgcgccattaatacgctcaacgggcggacgcggattgatggcgagtcgcccttcatccaaccaggcttcgatatctcggtcacacagacgcatgggctttctccttataaggctgcttcccgcacgcttcgcggcggagagggcaacagggctactctttgcacgttacacaattcggccaggttattcaaagaactgactgattttggccttcagaatatcaatagcgatgcggtttttgccgccgcgcggcacgatgatgtcggcatactgcttcgacggttcaataaactgcaggaacatcgggcgcacggttttctgatactgggccatcaccgagtccatggagcggccgcgctcgttaacgtcgcgcttaatacggcgcatcaggcaaatatcgagaggggtgtcgacgaaaatagagaagttgagctcgttacgcaggcgcgcatcggtcagcagcaggatcccttcaaggataatcaccttcttcggctcgacgtgaatggtgttcggcgtgcgggtatgctcgacgtagctatagaccggcagttcaatcggctggccgcttttcagcatctgcaaatgctggaacaacagactgtggtccattgagctcgggtggtcatagttggttttgacgcgctcttccatcgacagatggctttgatctttgtaatagctgtcttccggaatgacgccaatatgttcgtcgccaacttgttcacgcaattcgcgatagagagtactggcgataagacttttgccagaagccgatgcgccggcgatgcctacaatgacgcactgatgggacatatcagtcataaatttttgcgacctgattaacctggatagagatggagggtggcggcggaccgccaaacgcggcaattatagggatttcagcgtcccgataccagtggtatgcgccccgggcggctattccgccgccggcgcccagtcatcggtataccagatatgcaacagcgcgtaggatcgcatcggctgccagcggcgggcatagcgggcgatggcggccggggtcattcccggaaagcgctgtttaatcaggtaatcatccggcaaaaagatatctttcgcctgccagccgcgcagggcaaagtagtttgccgtccagcggccaatcccgggcagggtctgcagttgacgcagcccggcgtcaatatccgccggcgccgtcaggggcagctcgccgctgagcgccgcccgggcgaggtggatcagcgcctccgcgcggcgcagcggcatccccagcgccttaagcgcctgcggatcggcccgggacagggcctctggcgtcgggaacaagacatatccaggcgcctctgcaagcggttcgccccagccagccgccactttggcggtgagccgggcggccatcgccacgctcaccagctggcccagcaccgcgcgcaccgcctgctcgaaggcatccagcgcccccggcaggcgcagccccggccgcgcctgcgccagatcgcccagcgtgcgagcgacctgccgcgggtcgcaggctaaatcaaacagctggccaattcgcgcatagcagatctccgctaccggctgcagtcccggggaaagagtcacccgcaggccctgcgcctcttcgtccggcgccagatgaatcagcccgcggtggccttccacgccaaagctgcggctgtagcccccatcgtgaaaacgctcgacgccggcgaccgcgcgcgcctgcagaaaaccaaccatccacgcccagtcatagggcggggtccagggtaacagcaccataagctctcctttatatagcgtttcaatgatagtcgcccttgaccatcagcgccttgcttttaaattccggttgtcggcatggcgacgatccgctaaagtcgccccccttcttcaccggcatggggattttgcagacgatgtttattggttttgactacggcaccgccaactgttcggtggccgtgatgcgggaaaataccccccagctgttaacgctggaaaacggcagcaccctgctgccctccatgctctgcgcgccgacgcgcgaagcggtcagcgagtggctctatcgccatcatgatgtccccacccacagcgacgaaaaccaggcgctgctgcgtcgggccatcgccgccaaccgcgacgaagacatcgaggtgctgcgcaacagcgtgcagttcggtctcgcctccctgcagcagtatgttgaagatccgcaagaggtctacttcgttaaatcgcccaaatccttcctcggcgccagcgggctgaagccgcagcaggtggccctgtttgaagacctggtctgcgccatgatgctgcatattaagttgcaggccgaaagccagctgcccgagcagatcgaccaggcggtgattggccggccgattaacttccagggcctcggcggcgatgaggcgaacgcccaggcgcaggggatccttgagcgggccgcccaccgcgccggtttccgcgatgtggtctttcagtttgaaccggtggccgccgggctcgatttcgaagcgaccctcagtgaagaaaagcgggtgctggtcgtcgatatcggcggcggaaccaccgactgctccctgctgctgatgggcccgcagtggcgggagcgcgccgaccgccagcagagcctgctcggccacagcggctgccgcatcggcggtaacgatctcgacattgccctggccttcaaatgcctgatgcccctcctcggcatgggcggcgaaacggagaaaggcaccgcgctgccgatcctcccgtggtggaacgcggttgcgatcaacgacgtgccggcgcagagcgatttctacagcactgccaacggccgcctgctgaacgatctgctacgcagcgcccgggatgccgacaaggtggctctactgctgaaggtctggcgccagcgtcttagctatcgtctggtgcgcagcgccgaagagagcaaaatcgccctctccagcgccgccagcgtcgaaaccgcgctgccgtttattcaggacgatctggccaccgccatcgcccagcagggtctggaagccgcgctggatcagcccctgacccgcattatggaacaggtgcggctcgcgctcgacagcagccagaccaccccggatgtgatctatcttaccggcggcagcgcccgttcgccgctgatcaaaaaggcgctggccgctcagctgccgggtattccgctggccggcggcgatgattttggctcggtgaccgccgggctggcccgctgggcgcaggtggttttccgctagccctcgcccggcgctgccgcgcagcaggtctgtcctgatcctggcgctgcagattacgctggaatattcctggtctcccacgcaaaatggcctgttcgtccggacaggcctgtccactcttccccatttcagggggcgtattatccataccgtagccagatgtctgcggtctgtatcgttggcttgccgcaagggggcgtgattgaaaagggtgtctgcgatcttcggggcggtccggcgttgccggccgcagttcctggcaggctggctgctcagctgtggattattcttgctgctggtcgccccacaggcgcaggcggcgacgcgccaggtgggcattgatattccggtccagtggtacgcggacgccagcggccagatgaccctcgatcgcttcgccgccctgcccacagaccagctcgccaccacccggcagatcccctcctttggttattcgcgaaaaacctggtggctgcgcagcgaactgccgggaacgtggtttgccggggagccgcgctggctgcagctgggcccctcttttgtcgaccatctgactatttactaccggcctctgggcagcgatgccccctgggcacagcgcacctttggcgaccgcgacggcgcccgcgagagcgacctgcactaccgcgaaagcgtgctgatcctccccccgccgccgaccgccgccggctatgaggtggtctttcgcctgcagagcaccagcaccctgatcctgctggcctcgctctcctctgcgcaggcgtttgtgcagcgggccaccgctgacaccgctttctggagcttctacttcggcctggccgctgtcgccagcggtgtggcgctttggctggcgctggccctgcgccggcgtctgctatggggcatctgtcttttctcgctcaattatccgctggtggccgctctgcacggcttcccggagtggttcttcggccacgccgcgctgcccttccaggattttatgatcagtagcctctcgctgttcagctatgccaccgccctctggctgcatagcgagatttttgatctgaagaagaatatgccgcgacttcatcagctgctgatcgccgccgtgatactcaacctggtactgcaggtcagtattccgctcgggttttacggcttcgcgatgcagattgaaggggtagtattcatcattatcaccccggtgctgctgttcacctcctggtggctgtggcgcaaaaaagctatcgaccgtaccaccctgctgctgggtctgctgccgccgttctatgtcgtcgccgcggtgctggtgcagttgtcgatccatgggattatcccgttccatatggcgatctattccctctggcagtacgcgctgatcgtccacatcattacggtgctgatcattgccattctgcgggtgcgtgctgaaaaccgccagctggagcagaagcagcgcctggcgcgcgaactgcagattgagcgtgaagccagcttccaccagcggcagtttatgggcatggtggcgcacgaattccgcaccccgctggcggtgatccaggcggcgctggagaatcttcgcctctcggcggcctcgaccagccaggaggcgcgcttcgatcgcattggccgcgccgccacccgcctggtgcagctcaccgataactgccttgccgacgcccggctcgcctcccacgatctgcacgtcgagcgccagcagaccgccctgctgacggtgatcaacatggccgcctcggtggtggccatctcccatgatcactacctgaacatccgccagcacggcgcggtggaaagcccgcagctgcaggccgatgccggcctgctgtgcatcgccatcgctaatctgctggataacgccgtcaagtattcgccccccggtgaaatcgccatcgatattcattccgatgccgggcaaacggagctacgcattcgcgaccacggcccgggactccccgccggacaggcggaactgatctttgagcgctaccgccgcggcgagcacacatcgccggtgccaggcggcaccggtctcggactgtatgttgcgcgtcagatagtgcaggctcatgatggcaaactgtggctggccgagcatggcccggacggctgcacctttattctcaccctccccacggttgcttaagaggagaacgacgtatggctttacggctggcgataattgaagataacgccgatctgctggatgaactgctggcctggctgggctatcgcggcttcgaggtgtgggggacgcgcagcgccgaagccttctggcggcaactgcacagccatccggtggatatcgtgctggttgatatcggcctgcccggcgaggatggcttcagcgtactgaactatctgcatgagctggggcactacggtctggtggtggtcagcgcccgcggtcagcaacaggataaactgcaggcgctgagccttggggccgatgcctatctgatcaaaccggtaaacttcgcccatcttgccgagaccctcaccgccctcggcgcgcgcctgcgccaggaccgtccggcggctccgcctgcggaggcgatcggcacgccgccggccgtctcccccggcagctggcgtctgcaagaggataaactgatttcacccgacgcccggacgctggaattaacccagcaggaatatcgcctggtggagctcctgatgcgcaatcgcaacgaagtgtgcagcaaactggatctccatgcctgcctgttttcccatgaaagcgagcctgacctgcaccggatcgacgtggtggttagccgcctgcgtcacaaggcacgccagcaggggatccacctgcccgttcgcgcaatctttggtaagggactggcctttatttcctgaacgacggggcgcgtcggcggccgtgcgggatataaaaaactcgtaagtgttaatttttctcattttctgagagaaatgagaggaatgagactgacgatgaccttaagaactttcttatagtactagcacatcaggatgatggcgtaagattttcacgggacagaaaagcatataacaaaacgtattagccgttcgcggcaaattctgacaccatgcaacacaatcagggtaaaaacgatggccatgcaaacgtggttagttttattgctatgcatttttttcttcagcatctctgtatacagttttatttcctatctgaaagacaggaggcggcagaaattgacttttaacgataagcgttcgatgcgtcgtaaataattcactttaaaataataaaaaattattgtaggtgcttttatatcttcaacacaccgcatacgcccggaggatttgtcacagcatggcgttatgttttgcgtaaggaaataacgccatgagaaacattaatgtcaccatcaacacccgcaacgcctttgtccgtgaatcgctggtggccatggtcaatgacctcacccggggcgatctgcgggcgcgtttttcctggcgtaacaccgatctgtcagctgaagatatcattatctgcgaagtgatccccggggaaatatacctgtgtaataccctgattaagaacagaaaaagaggaagctcgctgattatcctccatagctatgaccagctgccggaagatgagttcatgattaactgcctgaaaggggtcatttttgtttcgctaaaaacggccagtattccgcaattgctgacgatcattaaaagcgagcttcagcattgtatgacccccacggctaccgacgccgcaggccgggaactcagctgcgccagctgtccgcatcgcgtgttatcacgatcgcagaccgccgtagtgcacggtattctcgaagggctggatatgagtaaaatcgccgccctgcagcgtgtgagtccccgcaccgccgcctatcataagaataagatcatggaaaaatacagcctgaataataatcatgaatttttccagtttatgaatcttttacgagagcgctggtaggcaaagagcagcacaaaaaaataagatattgacctggctatattgtcggaaatccgaaaatagtcgcaggatgctaaaaaatatccagcgctggcggacataacgttaaactctgacgcttcctcggtataaagacgttaccgcccgtctttatataataaaaaacacgctacacgaggaaaactgatacttcgtcacattgcccctgacgtgcctgtcaggggtcttttttccgtgtggaatagcgccctcagtgaaagggcgcggcaggatcaggcttccgctttctccacttcccagtccggctgcgcttcctcgtcggtcagcaacccttcatttttcgacagcatcgcggtggcgatgccattacccagcacgttgatggcggagcgccccatgtcgaggaaatggtcgatacccatcagcagcaggatcccggcgaccggtatattgaagctggggatcgtcgccgccagcaccaccagcgccgaacgcggcaccccggcgatacctttcgaggccagcatcagggtcagcatcatgaccgtaatctcgctaaagctcagcggcacgttataggcctgggcgataaacatcgcggcgaaggagcagtagaccatcgagccaacgaggttgaacgagtagccaatcggcaggacgaacgagacgatattgcgcgaacagccaaacttcaccagtcgctcgagggtcttcggataagccgcttccgagctgctggtggtaaaggccaccagcaccggatctttcagcatgttcagcaggcggaaaacctcttttttcagcaccatatagccgacggcaattagcaccgcgctggtcaacagcaccgccaggtagtagccgccgatgaacgaagcatagttgagcaggatccccagcccctgggaggcaatcaccgacgagatggcggcgaagatggccagcggcgcaacgtacatcacatagcccgtcaccttcagcataatgtgcgacaccacgttaagggccgccaccagcggagcattaaacttctcccccagcgacgcgccggcgatgccgaagaacatcgagaacaccacgatctgcaggatctcgttgttggccatcgcctcggtgatgctggtggggatggtgtgcgacaggaacccttttaggctcatgccgctgaccgccaggccggtatccaccgcctctttcggcaccgccaggtttaacccggcgcccgggtgctggaaggtgacgatcaccagcccgacgagaatggataataccgaggaggtgatgaaccagaccatcgccttgccgcctacccggccgatggtcgccgtctcgccgaggcgcataatgccgaccgtcagggtgctgaacaccaacggcgcgatgaccattttgatcaaccgcagaaacagatcggtgagcagcgtgatattatccgcccaggcggaaacggtggttggcgtcgcgtaggcatggatagccgcgccggagaggatccccatcagcataaaaacgacgatgaagagcgtgagtttgtttgcgtttgccacagcaatgacccctgattatttaacacgttgatttttaagtgcatattttattattatgggaatgcactgatttattcaccgcataaatctaattaaagcccccgcggatacaactattttttgcttttttaaactaaaagttgatatcaccccggatatcggccgcgggagcgcccggcgtcgcggcggttatccagacatttctcaaccttcttttcataattcctccatttttacggccccttccctcactaaactagtatcattcagcgaaacgcttcaggatgagaccgtaaactaatgaaaggcagtaacatacgtcgttggggcgccgcgctggcggtagtgattatcgccggggccgcctactggttctggcacgatcgcgggacgagcggcagcggggctcccgccgccgggcagggcccgcaggggccgggcggcgcacgccatggccgctttggcgccgcgctggcgccggtgcaggcggccaccgccaccgaagaagcggtcccgcgctatctcaccgggctgggtacggtgacggcggccaacaccgtcaccgtccgcagccgggtcgacggccaactgctgagccttcacttccaggagggacagcaggtcaaagccggcgacctgctggcgcagatcgaccccagccagtttaaagtcgccctcgcccaggcgcagggtcagctggcgaaagatcaggccaccctcgccaacgcccgccgcgatctcgctcgttaccagcagctggtgaagaccaacctcgtctcccgccaggagctcgacactcagcagtcgctggtggtggaatccgccggcacggtgaaagctgatgaagcggccgtcgccagcgcccaactgcagctcgactggacccgcattaccgcgccaattgacggccgcgtcggcttaaagcaggtcgatatcggcaaccagatctccagcggggataccaccgggatcgtggtccttacccagacgcacccgatcgacgtggtctttaccctgccggaaagcagcatcgccacggtggtgcaggcgcagaaagcgggcaaagcgctcagcgtcgaagcctgggatcgcaccaataagcagaaaatcagcgtcggcgagctgctgagcctcgacaaccagatcgatgcgaccaccgggaccatcaagctgaaggcgcgctttagcaatctggacgacgcgctgttccccaatcagttcgttaacgcccgcctgctggtggacacccagcagaacgcggtggtgatccctgccgccgcgctgcagatgggcaacgaagggcatttcgtatgggtgctgaacgatgagaataaggtcagcaaacacagcgtgacgcccggcatccaggacagccagaaagtagtcatcagcgccgggctttccgccggagatcgcgtggtcaccgacgggattgaccgcctgaccgagggagcgaaggtggaagttgtcaccgccagcagcggcgagcaggcgcagcccgccccgcgccagagcggtaaacacggagcgcgttcctgatgcaggtgttacctccaggccgcaccggcggcccgtcccggctgtttattatgcgtccggtggccaccactctgctgatggtggctatcctgctggccgggatcatcggctaccgctttctgccggtctccgccctgccggaggtcgattacccgaccattcaggtagtcaccctctatccgggcgccagcccggacgtggtgacctccgccatcaccgccccgctggagcgccagttcggccagatgtccggcctcaagcagatgtcgtcgcaaagctctggcggcgcctcggtagtcacgctgcagttccagctgaccctgccgctggacgtcgccgagcaggaagtgcaggcggccattaacgccgccaccaacctgctgccgagcgatctgcccaacccgccggtctacagcaaggtgaacccggcggatccgccgatcatgaccctcgccgtcacctcctccgccatcccgatgacccaggttgaggacatggtggagacccgggtggcgcagaagatctcccaggtttccggcgtcggtctggtgaccctcgccggcggccagcgcccggcggtgcgggtgaagcttaacgcccaggccatcgccgccctcggcctgaccagcgaaaccgtgcgcaccgctatcaccagcgccaacgttaactccgcgaaaggcagcctcgacggcccggcccgcgcggtgacgctttccgctaacgatcagatgcagtccgctgaggattatcgccggctgattatcgcttatcagaacggggcgccgatccggctcggcgatgtcgccagcgtcgaacaaggggccgaaaacagctggctcggggcatgggccaaccagcagcgggccatcgtgatgaacgtccagcgccagccgggggccaacatcatcgacaccgccgacagcattcgccagatgctgccgcagctcaccgagagcctgccgaaatcggtgaaggtgcaggtcctctccgaccggaccaccaacatccgcgcctcggtgcgcgacacccagtttgagctgatgctggccatcgccctggtggtgatgatcatctacctgttcctgcgcaacgtgccggcgaccattattcccggcgtcgcggtgccgctgtcgctggtgggcactttcgcggtgatggtgttcctcgacttttcgatcaataacctgacgctgatggccctgaccatcgccaccggcttcgtggtggatgacgccatcgtggtgatcgagaacatctcgcgctatatcgaaaaaggcgagaagccgctggccgccgcgctgaagggcgcgggggagatcggcttcaccatcatctccctcaccttctcgctgatcgcggtgttgatcccgctgctgtttatgggcgatatcgtcggccgcctgttccgcgaattcgccgtcacccttgccgtcgctattcttatctcggcggtggtctccctgaccctgacgccgatgatgtgcgcccgcatgttaagccacgaatcgctgcgcaagcagaaccgattctcgcgggccagcgagcgtttcttcgaacgggtgatcgccgtctatggccgctggctgagccgggtgctgaaccatccgtggctgacgctcggcgtcgccctgagcaccctggcgctgtcgattatcctgtgggtctttatcccgaaaggctttttcccgatccaggataacggcattatccagggtaccctccaggcgccgcagtcggtctccttcgccagcatggccgagcgccagcggcaggtggccagcattatccttaaggatccggcggtggagagtctgacctccttcgtcggcgtcgacggcaccaacccggcgctgaacagcgcccgtctgcagatcaacctcaagccgctggacgaacgcgacgaccgcgtccagacggtgattagccgcctgcagcaggcggtggacggcgtccccggcgtggcgctctacctgcagccaacccaggacctgaccatcgacaccacggtgagccgcacccagtatcagttcaccctgcaggcaaactccctcgaggcgctgagcacctgggtgccgccgctgctcagccgcctgcaggcccagccgcagctggccgacgtcagcagcgactggcaggacaaaggcctggccgcctatatcaaggtggatcgcgacagcgccagccgcctcggtatctcaatggccgatgtcgataatgcgctgtacaacgccttcggccagcggctgatctccactatttacactcaggcgaatcagtatcgcgtggtgctcgagcaggataccgaggcgacgccgggcctggcggcgctggagaatatccgcctcaccagcagcgacggcggcatcgtgccgttgaccgccatcgccacggtggagcagcgctttaccccgctgtcggtgaaccacctcgatcagttcccggtgaccaccatctcgtttaacgtcccggacaactactcgctgggcgaagcggtggaggcgatcctcgccgccgaacagtcgctggatttcccgaccgatattcgcacccagttccagggcagctcgctggccttccagtcggcgctcggcagcaccgtctggctggtggtcgccgcggtggtggcgatgtatatcgtgctgggggtgctgtacgagagctttatccacccgatcacgattctctccaccctgcccaccgccggggtcggggcgctgctggcgctgtggctggcgggcagcgagctggacgtgatcgccatcatcggcatcattctgctgatcggcatcgtgaagaagaacgccatcatgatgatcgacttcgcgctggccgctgagcgcgagcagggcatgccgccgcgggaggcgatctaccaggcctgtctgctgcgttttcggccgatcctgatgactaccctcgccgccctgctcggcgccctgccgctgatgctgagcaccggcgtcggcgccgagctgcggcgtccgctggggatcggcatggtcggcggtctgatgctcagccaggtgctgaccctgttcaccaccccggtgatctatctgctgttcgaccgcctgtcgctgcacctgaagcgccgcttcccgcgtcaggaagaggaggcgtaagtgaagtttttcgccctcttcatttaccgcccggtggcgacgatcctcatctcgctggccatcaccctgtgcggcattctcggcttccggctgctgccggtagccccgctgccgcaggtggacttcccggtgatcatggttagcgcctcgctgccgggagcctcgccggagaccatggcctcgtcggtggccaccccgctggagcgctccctggggcggattgccggggtcaatgagatgacctcctccagctcgctcggcagcacccgcatcattctcgagtttaacttcgaccgcgatatcaacggcgcggcgcgcgacgttcaggcggcgatcaacgccgcgcaaagcctgctgccgagcggaatgcccagccggccgacctatcgcaaagccaatccgtcggatgcgccgatcatgatcctgacgctgacctcggacacctactcccagggtgagctgtatgatttcgcctccacccagctggcgcagaccatcgcgcagatcgacggcgtgggcgatgtcgacgtcggcggcagctccctgccggcggtgcgcgtcgacctcaacccgcaggcgctgttcaaccagggcgtgtcgctggacgcggtgcgcaccgccatcagcgacgccaacgtgcgcaaaccgcagggggcgctggaggacagcgcgcaccgctggcaggtgcagaccaacgatgagctgaagaccgccgccgactatcagccgctgatcgtccactaccagaatggcgccgcggtgcggctgggagatgtcgccaccgtctcggattcggtgcaggacgtacgcaacgccgggatgaccaacgccaaaccggcgatcctgctgatgatccgcaaactgccggaagccaatattatccagacggtggacagcatccgcgcccgcctgccggagctgcagcagaccattccggcggctatcgacctgcagatcgcccaggaccgctcgccgaccatccgcgcctcgctggaggaggtggagcagacgctggtgatttcggtggcgctggtgatcctcgtggtgttcctgttcctgcgctcggggcgcgccacgctgatcccggccgtcgccgtcccggtttccttaatcggcaccttcgccgcgatgtatttgtgcggcttcagcctcaataacctgtctctgatggccctgaccatcgccaccggcttcgtggtggatgacgctatcgtggtgctggagaatatctcccgccatctggaggcagggatgaaaccgctgcaggcggcgctgcaggggagccgcgaggtcggctttaccgtgctgtcgatgagcctgtcgctggtggcggtgttcctgccgctgctgctgatgggcggcctgcccggccgcctgctgcgcgagttcgccgtcaccctgtcggtggcgatcggcatctcgctggcggtctccctcaccctgacgccgatgatgtgcggctggctgctgaaaagcggcaagccccaccagccgacgcgcaaccgcggctttggccgcctgctggtggccgtgcagggcggctatggtaaatcgttaaaatgggtgctgaagcatagccgcctgaccggcctggtggtgctgggcaccatcgccctcagcgtctggctctacatttcgatcccgaaaaccttcttcccggagcaggacaccggggtgctgatgggcggcattcaggccgaccagagcatctccttccaggcgatgcgcggcaagctgcaggactttatgaagatcattcgcgaagatccggcggtggataacgtcaccggctttaccggcggctcgcgggtcaacagcgggatgatgtttatcaccctcaagccgcgcgaccagcgccacgagacggcgcaacaggtgatcgaccggctgcgcaaaaagctggccaacgagcccggggccaacctgttcctgatggcggtgcaggatatccgcgtcggcggccggcagtcgaacgccagctatcagtacaccctgctgtccgacgacctgtcggcgctgcgcgagtgggagccgaagatccgcaaagcgctggcggcgctgccggagctggcggacgtcaactcggatcagcaggacaatggcgccgaaatggacctggtctatgaccgggataccatgtcgcgcctcggcatcagcgtccaggacgccaacaacctgctgaacaacgcctttggccagcggcagatctctaccatctaccagccgctcaaccagtataaggtggtgatggaggtggatccggcctacacccaggacgtcagcgccctggataagatgttcgtcattaacagcgacggcaagccgatcccgctggcctacttcgccaaatggcagccggccaatgccccgctgtcggtgaaccaccaggggctgtcggcggcatccactatctcctttaacctgcccaccggccgctcactgtcggaagccagcgaggccattgaccgcgcgatgacccagctcggggtgccgtcgagcgtgcgcggctcctttgccggtaccgctcaggtgttccagcagaccatgaacgcgcaggtgatcctgatcctcgcagctatcgccacggtctatatcgtgctgggggtgctatatgagagctatgtgcatccgttgaccatcctctcgacgctgccctccgccggggtgggcgctctgctggcgctggagatcttcgatgccccgttcagcctaatcgccctgattgggattatgttattaattggcatcgttaagaaaaacgccatcatgatggttgattttgccctggaggcgcagcgtaacggcaacctgacgccggaagaggcgattttccaggcctgcctgctgcgtttccggccgattatgatgaccaccctcgctgcgctgttcggcgccctgccgctggtgctctccgggggcgatggctctgagctgcgccagccgctggggatcaccatcgtcggcggtctggtgatgagccagctgttaacgctctacaccacgccggtggtctatcttttctttgaccgtctgcggctgcgtttttcgcgtcactcctctcaaccggtaagcgaataacatgacagacctcccggccagcgtgcgctggcagctatggatagtggcgttcggcttctttatgcagtcgctggacaccaccatcgttaataccgccctcccctcgatggccaaaagcctcggggagagtccgctgcatatgcatatgattatcgtctcctatgtgttaacggtggcggtgatgctgccggccagcggctggctggccgaccgggtcggggtgcgcaatatcttcttcaccgccatcgtgctgtttaccgccggatcgctgttttgcgcccaggccagcaccctcgaccagctggtgatggcgcgggtgctgcagggggtcggcggcgcgatgatggtgccggtcggccgcctgacggtgatgaagatcgtcccgcgcgatcagtatatggcggcgatgaccttcgtcaccctgccgggccaggtcggcccgctgctcggcccggcgctgggcggggtgctggtggagtacgcctcctggcactggatcttcctcatcaatatcccggtggggatcgtcggcgcgatcgccaccctctgcctgatgcccaactacaccatgcagacccggcgcttcgatctctccggctttctgctgctggccgccgggatggcgaccctgaccctggcgctcgacggccagaaagggctcggcatttcccctgcctggctggcggggctggtggccgtcggcctctgcgccctgctgctctacctgtggcacgcccgcggtaacgcccgggcgttgtttagccttaacctgtttcgcaaccgcaccttctccctcggcctcggcggcagcttcgccggacgcatcggcagcggcatgctgccgtttatgaccccggtgtttctgcagatcggcctcggcttctccccctttcacgccgggctgatgatgatcccgatggtgctcggcagcatgggcatgaagcggatcgtggtccaggtggtcaaccgctttggctaccgtcgggtgctggtcgccagcaccctgggcctggcggcggtcagcctgctgtttatgtttagcgccctggccgggtggtattacgtgctgccgctggtcctgtttctgcaggggatgatcaacgccagccgcttctcctcaatgaataccctgacgctgaaagatctcccggacgatctggccagcagcggcaacagcctgctgtcgatggtgatgcagctgtcgatgagtatcggcgtgaccatcgccgggctgctgctggggctgtatggccagcagcatatgagtctcgacgccgccagcacccatcaggtctttctctacacctatctgagcatggcggcgatcatcgccctcccggcgctcatcttttccagggtaccggatgacgtcggcagcaataccgtcctccgtcgacgcaacaggagtggatcgtgaaattatggcgcccgggtattaccggcaagctgttcctcgctatattcgccacctgcatcgtgctgctgatcagcatgcactgggcggtgcgcattagttttgaacgcgggtttatcgactatatcaagcgcggcaatgagcagcgcttaaccatgctcagcgacgcgctgagcgagcagtatgcccagcatggcagctgggcgtttctgcgcaacaatgaccgctttatcttccagctgctgcgcaccttcgaacgggataacgacgaccgctcgccgccggggcacgccatgaagccggacaccgccccgaacgggccgccgccggatggcccccctgacggcccgcgtccgaggccggaaatgccgccccacggctggcgcaccatgttctgggtggtggatcagtcggggcgcgtgctggtggggccgcgtgagcgcgtcccggaggacggcacccagcgcagcatcgtggtcaacggcgcggaggtgggcaaagtgatcgcctcgccggtagagcggctgacgcgcaataccgacattaacttcgaccggcagcaaaagcgcaccagctggctgattgtcgcccttgccaccctgcttgccgcgctggccactttcccgttggcccgcggtctgctggcgccggtgaagcggctggtggaaggcacccataagctggcggcaggcgacttttccacccgcgtgacggtgaccggcggcgatgagctcggccgcctggcgcaggattttaaccagctcgccagcaccctggagcgcaaccagcagatgcgtcgcgatctgatggccgatatctcccatgagctgcgtaccccgctggcggtgctgcgcggcgagctggaggcgattcaggacggggtccggcgctttacccccgagtcgattccttctctgcaggccgaggtggctaccctcaccaagctggtggacgacctccatcagctgtcgatgtccgacgagggggcgctggcctaccagaaaacctcactggatatcatcaccctgctggaagtggcggcgggcgcttttcgcgagcgcttcgccagccggcagctaagcattcaggtgtcgctcccggagcaggcgatgatcttcggcgaccgcgaccgcctgatgcagctcttcaacaatctgctggagaacagcctgcgctataccgacagcggcggcagcctgcacattaccgcccgccgcagcggtcgcatgctggtgattgtcttcgccgacagcgcccccggcgtcagcgatgagcagctggcccgcctgtgcgaacgcttttaccgggcggaaggatcgcgcaaccgcgccagcggcggctccggcctcggactggcgatttgcctcaatatcgtagcggcccacggcggcaccctgcgtgccgaccattcgccttttggcggggttagcattaaagttgagttacctctggaacatgatttaccgagagacgtatgactgaattgcctgtagatgaaaacaccccacgcatccttatcgtggaagatgaaccgaagctcggccaactgctgattgattatctgcaggccgccggctatgcgcctgcgttgattaaccacggcgacaaggtcctgccctacgtccgccagacgccgccgcacctgatcctgctggatctgatgctgcccggtaccgacggtctgacgctgtgccgggaaattcgccgcttctccgatgttccggtggtgatggtgacggcgaaaatcgaagagatcgaccgtttgctggggctggaaataggcgccgacgactatatctgcaagccctacagcccgcgggaagtggtcgcccgggtaaaaaccatcctccgccgctgcaagccgcagcgcgatctgcaggcgctggacgcccggagcccgctgattgtcgacgaaagtcgttttcaggcctcctggcgcgacaagctgctggacctcactcccgccgagttccggctgctgaaaaccctctcccaggagccgggcaaagtgttctcccgcgaacagctactcaaccatctgtatgacgattatcgggtagtcaccgatcgcaccatcgacagccacatcaagaacctgcggcgcaagctggaggcgctggacgccgagcagtcgtttatccgcgcggtgtatggcgttggctaccgctgggaagcggacgcctgccggctggcgtagttagccttttcccggctcgcgctgcgcttcgccgggctacacgttcaccgccatctgcaatccgtagcccgggtaaggcgtttacgccgcaacccggggaactccctagagcctatcccaccaggcgttattaacgctgtcagtgtgagcactgcccaggttcaaaatggcaaacaaattagccatactgaaagatacctatctgatatttactccccttcgccgcggcgctacaatgcccgcccttaatgtggggacactccccaactcgccgcaccaggtgcggcgaatctgacctgtcatcagaacgagaacaccatgtttaaaccagaactcctctccccggcgggaacgctgaagaatatgcgttacgctttcgcctatggcgccgatgccgtttatgccggccagccgcgctactcgctgcgcgtgcgtaacaacgaattcaatcacgaaaatctgcagctcggcatcaatgaagcccacgcgctgggtaaaaaattctatgtggtggtcaacatcgccccgcataacgccaagctgaaaacgtttattcgcgatctgaagccggtggtggagatgggtccggacgcgctgatcatgtccgatccgggtttaatcatgctggtgcgggaacacttcccggagatgccgatccatctttcagtgcaggccaacgccgtcaactgggcgacggtcaaattctggcagcagatggggctcacccgcgtgatcctgtcgcgtgaactgtcgctggatgaaatcgaagagattcgccgccaggtgccggagatggagattgagattttcgtccacggcgcgctgtgcatggcctactccggccgctgcctgctctccgggtatatcaacaagcgcgacccgaaccaggggacctgcaccaacgcctgccgctgggaatacaacgtggcggaaggcaaagaggacgacgtcggcaacatcgtccacaaatatgagccgatcccggtgcagaccgtggagcctaccctcggcatcggcgcgccgaccgataaagtctttatgattgaggaagccaaacgtccgggcgaatacatgaccgcctttgaggacgaacacggcacctacatcatgaactcgaaagatctgcgggctatcgcccacgttgagcgtctgacccagatgggcgttcactcgctgaagatcgaaggccgcaccaaatccttctactactgcgcgcgcaccgctcaggtttaccgcaaggcgatcgacgatgccgccgccggcaaaccgttcgataccagcctgctggagaccctggaggggctggcccaccgcgggtacaccgaaggcttcctgcgccgccatacccatgacgattatcagaactacgagtacggctactccgtctccgagcgccagcagtttgtcggcgaattcaccggagagcgtaacggcccgctggcggccgtggcggtcaaaaataagttcagcgtcggcgacagccttgagctgatgaccccgcagggtaacgtcaacttcacccttgagcatatggagaatggcaaaggcgaaaccatgccggtggccccgggcgatggctataccgtctggttgcctgtgccggacgacctgcccctgcagtatgccctgctgatgcgcaactttactggtcaaacaaccagaaatccgcacggtaactagttaatttgcgttattttttcacgatgtaaggatattagaatcggatcacataccgtttcgatcgaaacaggtatcatccatttcgctgaaaaacataacccataaatgctagttgtaccaggaaccacctccttagcctgcgtaatctcccttacgcgggcttatttttttgcctctcctccggtcttcgctttcgtcatgcggtacactttatgcaacattgagcaataaaggttcccttgatgatgtctacgtttcctgccagcttactgatccttaacggcaaaggtgccaatgaaccgcagctacgcgaagcggttaacctgttacgcgatgaagggattgatattcacgtccgcgtgacctgggaaaagggcgatgccgctcggtttatcgatgaagccctgcagctgaacgttgaaacggtgatcgccggcggtggcgatggcaccattaatgaagtggcgaccgcgctggtggagcgcggcggcaagatggcgctggggattttaccgctgggcacggctaacgactttgccaccagcgtcggtatcccgcaggatctggccagcgccctcaagctggcgatcgtcggccgcgatgtgccgatagatatcgcccgggtgaatgataaaaccggctttattaatatggcgaccggcgggttcggcacccggatcaccaccgaaacgccggaaaaactcaaggccgcgctcggcggtgtctcttatttaatccacggtctgatgcgcatggataccctgaagccggaccgctgcgagatccgcggggagaactttcactggcagggcgatgcgctggtcatcggcatcggcaatggccgccaggccggcggcggccagcagctgtgcccggaggcgttgattaacgatggtctgctgcatctgcgcattttcaccggcgaagagctgatccctgccctgttcagcaccctggcgaatccggaaaactcgccgaatattgttgacggtgtctcctcgtggtttgaaataaccgcgccccatgagatgacctttaacctcgacggcgagccgctcagcggaaaaaccttccgtatggagctgttaccggcggccctgcgctgccggctgccgcccgactgcccgctgctacgctgatcaggcttcgcaaagcaaagacggtgcccggctggtatacagcagccgggttcgttgattgagcctctgaatgttaaggtaaaacggcacctgcggctgcaggaaaaacctgggcaggatatcgatccaagcaccgcgcttacattaatagacgatacccacaaccacaaaaaacctataacatcaaatagttacccattaaaatgggcgcatctgccgtgagacaatgcgccataaagcttagtattccgccacctcgcgcgccatttcgcgcgtatattgccgactggcgttaaccagcatctgcgtataggccgtctgcgcctggccgctgaccagcgcatcgaccgtcagggtttcgaggatcttcccgtactgcatcaccgccactttctggcataagtgggcaataaccccaagatcgtgggtgaccatcaggtaagtgagcttagcctcccgctgcagttccgccagcaggttaaggatctcagcctgcaccgacacatccagcgccgacgtcggctcatccagcagcagcacctgaggctcaagaatcagcgctctggctatcgccacgcgctgccgctgcccgccggagagctgatgcggatagcgctcgcgaaaggcgcggttgaggccaactttatccagtagcacattgatccgccggtcgcggtcgttgatacgatggatctgcagcggctcttcgaggatatcgccaatggtgtgacggggatgcagcgatccgtaggggtcctgaaataccatctgcacctgacggcagcgctcgcggctaatttcatgccctaagggctgagcatcgatggtcagttccccctgccagtgggtaaacagccccgccaggcacttgagcaccgtcgttttaccggaaccggactctcctaccagaccgtagatctcgccgggcttaacgtggaaactgacgtcatacagcacctggttacgcttctccccctcgccaaacgcgaggttgagatgttgaacttcaatcattatccgctccttaatccgttaaccagctggcctgacgctgcagcaccggcagtatcgggcgacgatgctgcatatccggcagcgagttaatcaatccctgagtgtaggggtgacgggcgtgatcgagatctttagcggcgatggactccactacccgtccggcgtacatcaccagcacccggtcgcagaagctgcgcaccaggttgatatcgtggctgataaaaatcagccccagcccgcgcgactgaaccaggtcatccagcaggcccagcacctgcaggcgcaccgacacgtccagcgcggaggtgggctcatcggcaatgatcagctccgggtcggtaatcagcatcatggcgatcatgatgcgctgtccctgtccgccggatatttcatgcggataaagctgataaacgcgctccggctggcgaatacgcaccacctccagcatctccagcgccctggctttcgcctcatctttgcgcccgggatgatgagtaagccaggcctcggcgatttgcttacccacgcagaccaccggattcagcgaatatttcggatcctgcataatcatcgagatacgtttgccgcgtacgccgcgcatctgcgcttcgctaagatgctgcagatcgaggtcggcaaactgcatccggctggcgctgacgcgggcctttttcggatgcagctgcagcagcgcgcgcccaacggtggacttacccgaaccggactcgccgacaatagccagcttctcatgccccagctggaaggagacgccgcgcacggcgtgggtcaccgcgctaccgttaacaaagtcgacgcacaaatcgcgcacgtcgagcagcggtgcattattcactacggggatcgaggatgtcacgtaggccatctcctaagaagttgaacgctaagctattgatcaaaatcgccagccccggaatggttacgacccaccagcactccatcatataagtgcgcccgctggagatcatcgctccccactccggctctggcggctgcgcgccgaggccgagaaagcctaggccggccgcggtcagaatgatcccggccatattcatggtgatacggataatgaccgagggcagacacagcggcacgatatggcgccagaggacgcgggccgatgaagcgccctgcagacgcacggcggagataaaatcagcctggcgcagagagagcgtttcggcgcgcgccagacgggcaatcggcggccaggcggtcagcgtgatggcgataaccacgtgctccagccccggtcctaaagcggcgacaaacgccagcgccaggaccagactcgggaaggagatgaaaatatcggtgacgcgcatcagcaccatatcgactttaccgccgaaatagccggcgctgacgcccagcagcagtccgagcggaccgacagtcaccgagaccagcagcacgatatagagcgtgatgcgggagccgtacaccaggcgactaaagatatcccggccaaactcatcggtgccgaaccagtgctgcgcattcggcgcgaccagcgcactattcaggtcctgtaccagcgggttataaggcgcaatcagcggcgcgaaaatcgccaccaccagcagcataaagataattcctccgccgatggccgtgagcggattgcgcgccattttgccgataaacccgacggtccgcgccgccgcgcgttgcagccgctgacggccttcgcccgcaccacccgaaagcggcgaatccagagaaacggtcatgattttgtcctcgggtcaaagaattgatacagcatgtcggagagcaggttgagcatcacgaagatcacccccaccagcagcacgcagcccatcaccgcattcatatcgcccagcagcaagcttccggtaaggtaggagccaaaccccggccatgagaagacggtttcaatcagcaccgcgccttccagcagcgcgccgtaggccagcgccaccaccgtcagcagttgcacgaggatgttacgaaacgcatggttccagataacctggcgctcggtcagccctttcacccgggcggtaataatgaactcctgcgacagctgggccagcataaagctgcgggtcatacggctgatataagccagcgagtgaaaacccagcagcgaggcgggaagaatcagatgattaatggcgttccagaacacctggccgttgccggccagcagcgcatcaacggtgatcagcccggtgcggcgcggcaccacaccatccagcccgagatctaccctcccggcgccgcctacccagccaagccaggcatagaacaccagcagccccatcatcccgacccagaagatcggcgtcgagtagcccgccaggctgataatgcgtaccacataatcggagacgctattgcgccgcgccgccgccaacacgcccagcggaataccaagacccgcgccgacaataatcgccatcgttgccagctccatggtggccgggaagacgcggataatatcgtccaccaccggtttcccggtcagcagcgcgttgcccagatcgccgtgcaacaggttgacgaaatagatgccaaactgggtggtcagcgatttatcaaaccccagctgctggtaaacctgctgataggtactctggtcagcatccgggccgacaatcgccagcaccgggtcgatgggcatgacgcggccaatggtaaaggtcagcagcagcaggccgaacagtgtaatcaccacctgcagtagccgttttgataagcgccggccgcgtgagccgggcgcaaggattgcggtactcatcctttctctccttcgcggactttatagacgtcacgcagaaaagtggtggcggaggggtgcggctgatactcccgtacctcgttgcgcacgacgaccgaatcaaccatctgcgaaagcggaattaaagccggaaccagctggtcgtagcgtgtctggatggcctggtagtcagccacctgtttttgcggatcgcgttccagcagggcctggtcaatcatcgtattcagttgcgggtcgtaaaaaccggtacgccagccctggaagttggtcagacgcgccttatcgctgttatccgggttatagaccagcgcgcgcaggctggaatgcggatgcggctccatcccgctgccgccgcgacctaccagcaggtcaaatttacgctcgcgcattgcgccgtagatctggttaccagtgccggtgatgattttggcgttaatccccgcctgcatcagcgtcgactgcacggcgatagcgatgttaagaaatggctgatcggagagtacccgcagcgtggtatcaaagccgttgggatatcccgcttccgccagcagctttttcgcccgcgccacgtccagcctgtagccgggatcgggtagcgtggacggcattcccgctttgataggccgctggtgcagcacgccgtagcccggcatcagcgctttattgataccctggtaatcaatcagatagcgcaccgcctcgcgcactttcggattggcgaagtgcgcctctttcatgctcatcgccacgtagtacatggtgccgcgctgcaccgcatcgacggtcagctgcggatcgctgcgcagggcgttgatatcggaaaccgccatattgttggcaatatcaaggtcgcctttttcgatcatcaggcgcagagtttgcgactcctggaaatgacgcagtaccacgcggctcattttcgcctcgccgcgccagtagtcagggttgcgcttcatgcgcagcacatctttcgcctgccaggtttcgaggataaacggcccggaaccggcttcatgggtggttagccagcggttaccccagtcgttatcctgctgatggctttgcaccgttttactgtccagcactccgaggttgcccagcgccgccagcgagtaaatcaccagctgcggatcgttatctttgggtaatacgatttgcaccgtgaagcggtccggcgcgctgacctggctgtcgatatttttcttactgaagccataggatttccatactgaggcctgggccaggttgaggtgcaggatgcgccgcattgaccacacgacgtcgacggcggtcagcgggttgccggagtgaaacttaacgtcatcccgcagatgaaaggtcagggttttgccgtcggggctgatatcccaggatttcgccagcgcgggcctgacggtggtgagctgctcagggtcaagctccaccagcgagtcgtagaggttgaccacgatccccaccacttcgttaccggtcatcgccgccgggtcaagggtgagcaggttattcatattcatgccgatgatcagctggtcgggcggcgttttcgccaccgcctccccgctccccatcgacatggcgagcgcgagaatacacgctcccagtaaggaggtttttttcatatctctgtttgcctgtactgtagggtacatgttgccggatggcggcattttcggcttatccggtctaccgggccgcaggctcgataagcgtagcgccatcgggtatttatttttttaaatcagtcgtggctaacggtattggcttcgatatacgcaaaattaatgtcttcaccgagacccggacgttgtgacaaatgcacaaatccctggtcatccatcgggtcgacaatgctgttgagataggccgccggttcatcgtagtcgaggaacggatgcagcaggccgcgctcgtaccagcggcagttgcggatcgcgcccaccaccgccaggcttgccgctccgttgccgtggacttcgcaatccatgccgaaagattccgccagcgccgccaccttcatggtcggtgtaatcccccccacgccgttagcgccggcgcgcagaatgtcgcaggccccggctttcacccattcggcgcgcatgtggtgcttgccgccgaagctctccggcccgacgatgggaatcgacaggttttccgccagccacgcataggaagacatcgaatcctcctccatcggctcttcaaaccaggcgaaattgagtttttccagctctttgccgatccacagcgcctcggcgcggctgtaccagtgatagccatcaatcatcaggtcaatatccggccctacggcttcgcgcaccgccgcgcaggctttaatgtccattttgggattgggcgcaaaagagattggcggcatccaggtgtgcagtttgatggccttgtagccgcgggcgaccagcttctcagcaaaagcggcatactcttccggggtcgacaggccgcccggtagatcgtcgccgcacatggtgctaccgtaagccgggacggtgtcgcgatagccgccaagcagcttgtagaccggcatcctgaggctgcggccaatcaggtcccacagcgcttgttcaacaaacgacagcgcgcgctccgttagctgatgtgcgctgccgcgctgccagtggttaagatcctgccagatacgctcgcggttaaacgggtcctgccccaccagcactttgcgaaaaaaagtattcaccacgaacgggcgcacgacttccggaggcgcaaacgaaaaaccctgcgccccatcatcagcggtgatggtcagcatcgccattttggccatgctttcagcccccggatgggagtgcccggcgctgtcggaaacccgacgagtgggatactggaaaacggtgacattcacagattcaattttcatgctcaatccttatcacggccaaatccgatcgacagaggtaaatcggcaaagcggtttcacattattgaaaatacgtttcaatatataatctaagcacaattacgtagcagtgcctcggacaaacaccgctaagcaaggccataaatttgggcattggcacaacaagacgtgactgttttcacaaaagatgagcgaaatgtgaggcggatcggcatggagaaaaaagggcgtgagcgcagaaaagagagtgaccgaccgtgtacatcccgggattttctgcgctcacgaaagcgtaagttatgcgaccgtcgctggctcggcgttaagcgcttccagcagttcaggtaaggtttgatagcggccgacagcggcctgatagcgcccctgtcggctatcttcggcaaccaccgccgtgggaataccggcggcctgagccgcgcaaaaaccgttgtaactatcctcaatcaccagacactggctggcgttgagattgagcttgcgcagcgtcgtcaggtacaccgccgggtgcggtttgccgcgtggttcatcatccgcgctgcaaaccacgtcgaaaaagtgccagagcgagagcttgttcagcacagcggcaataacctggcgggatgatgacgtggcgagcgcaatttgatagcccgcctcgcgaaaatagcgtaacgcctcatgcacgccgtgcatcggctcgccttcgttggcgatcaggccggtaatacgctgcaatatcgcggcttcaagccgctgcgggtcgagatcaagctgaaaatagcggcaccaggtgccggcaatgtcgtcgaggcgcttgcccttggtcagggtttcacattcagcaacgctcgccgttgccccccactgcgcgagggcgtcaatctgcgcctgacgccacagcgcctcggaatcaataatcacgccatccatgtcaaaaataaccgcctgcatactcattcgttcacctcattaaggctggcatgaagcgcatgccagccgcagtacctatgagaattcaacctgctcgcgggcggttgcttccttgtgggagaaccccggctgctccacgcggataaaggcgcagaggaaaaaggccaccacgtacaatgcggtataggcgatcaccaccccgatggtgctgaagaacggcagcagcaccacggcaatcgccggtgcgagaaagttcgacatccccgccgacaggttatagaccgaaatggccgcacctttatgcttcggctccagcgccgggaacacggccgccagcggcacgaaggcggcgacaaagatcccgagggcgatggcggggatcagcgccatcgcaaagctatggccaaagtgctgaggaatgtagtaaaacgccaggctggagagcgccatcccgatgcagccgaaccagcgcaccaccttcatccagcccagtttttccccgaggatcccccacagcacgttagagaaaatggtggtgaagaagaagactgcccatacctggagccattctgaagtgctgaaacccagctcatcgacaaacatcatcggcataatcaccgcaaagccgaacagcgagagggtattgataatcctcaccatgctcgacagcagaatattgcggttggtatagagcagcgtcgcggcgcgtcccagctcggaaaacttctcacgggtggtgagattctgcatatgctgcggcgtttgaatatggcgcagggaaaccagggcaatcacgcccccggtaaggcagaaggccagcgccagccacagggtgcccatttcgccaatgtgcggaatggtaaagctcggaatatagctgccgaagaccccgatgccgatggaatacaccgcccagaaccagccgatggccgagctggcgttgtcgcttttgacgttatggacaatcgccacgataaacgagtagaggaacagcggataggcgaagccgcggatgccgtagaaaagcaggatcagcgcatagttggcgtgaccgaggccgaaaacgaggaacagcacgtggaatacgcaccacagcacgaagccaatcatcatcgttttcagcggggtgataatttccgccaccaccccggaaatccacgccgacagcgcggcggccaggccgtagagggtaaaggcaaaggaggcctccgccggagagaagccgagggctttgatatagtgcgacagaaaggctaattcaaaaccgtcgccggtcataaatacggcaatggcgatgtatccccagagcaggttcaggggtaaaccgagccactgtttattattgatagacataatgacctcgttttcagggtacagggtggccgctccgcgacgtgcaacgaagcggcggttatgatgaaaatcagtgctgtcgatagtgcagatcgtttaaatacagggctttaaactgcgcgtagcgttgcatcagggtgtggtggcgaacaggatccgcacgccaggtctgccagacttccggtttttcacacaccgcggcaaccggtttgcccgccgccaggcaggccagccgcgccgcgcccagcgcgccgccggtctctccgcctttgtgggtcaccaccggcatagcgagaatatcggccagcagctgggcccagaacggactgcgggcgcccccgcccaccagcgagcactgcgcgatcggcgtcccgctctctttcaatgcctgcaggccgtcgttgatcccaaagctcaccccctccagcaccgcgtagccgagctgcgcgcgcaggctggcgtgggtcatgccccagaagatgccgcgcgcgtcaggatcgttatgcggggttcgttccccggagagataaggcaggaagaacggcgcgttggctttatcctcctcgcttagctcggcaatctccgccagcagcgccacctccgtggtgccggtcagacggcagaaccactgcaaacagctggcggcgctcagcatgacgctcatctggtgccacaggttcggcagcacgtgacaaaacgcatgtaccgccgactgcggcgccggacgataggcgtcggtcaccacaaacagcaccccggaggtgccgagcgaaataaacgcatcccccggcgaaaccgcgccgacgccaatggcgctgaccgcgttatcccccccgcccccggccaccaccaccgaggcgttcagcccccagcgggcagccacctgcgggtcaagggtggcggaaacctcgcagccttcgaccagcgtcggcatttggctgcgtgacaggccgcacttgtccagcagagcgtcggaccagtcgcgcttcgccacgtccagccacagcgtcccggcggcgtccgacatatcggagactttcttcccggtcatccggtagcgcagataatccttgggcaacagcaccgtggcggtgcgctgaaagtgctgcggctcatgacggcgcacccacaacagcttcggcgcggtaaagcccggcatcgccaggttgcccgccacctgatgcagctccggcgccatcgcctccagctcggcgcactctgcggcgcagcgggtgtcgttccacagaatggccggacggatcgcctccccctctgcatccagcaacaccgcgccgtgcatctgcccggagaggccaatcgccttaatggccggccaatgctgggcgcatttttcccgtagcgtggccatcaggtactccgtcgcctcccaccatagctccggcgcttgttctgaccagtgcggatgaggccgctgaatactcagcggcgcgctatggctggcgataacctcatggttctcatcaatgaccagcgctttgacttccgatgtgccgagatcgatacccagatacatagccacctcttagttaatcagcgtgtaaacggcggcgactttctcgcgcatcagcgccaggaaatccgcgttgttggcgagatcaccaaacagggctttatcgcgcgcgtagacagccaccggatcctgagcctcgaacatctcatgcaccgcctgcgcatccaggatgccgtcctggtactgatatggcagagttcccttgtgccactgctccataaagacgaagaacagcgccggcagcatggcggtcgcttccgggcggacgccgcgctggtagcactcctgcaaggttggcgcgatcatcgccggaattttcgagaagccgtcggcggcgacgcgctggttggtgtcctggatataggggttggtaaagcgcttaagcaccacatcccggtaggtcggcagatcaatgccgttatcgccgagacacggaataacgtcctccgtaacgtagcggtcggcaatggcgtagataacatcggtcagcgtgctttcatgaatatactgctggccgattaaggttcccgcccaggcaatgcagctgtgcgacgcgtttagaatacggattttcgcctcttcatacgggatgaccgactccaccatctccacgccgaccgcctccagattcgggcgggcatcgcggaagttgttctccactacccactggataaaggtctcccccatcaccggcgctttgtcatcaattccggtttgcgctttgatgcgggccggcagatcggccgccggacgcggggtgatgcggtccaccatggtgttcggacaggtggtgttggccgccatccagtcaatcaccgcctgtttgccggtgagctgcaggaactcgaccatgccgtcgtggaaacgctcgccgttatggcgcacgttatcgcagttgagcagggtcagcggcccggcgttgtcggccatgcgcttttccaggatccgcgcgagggtgccgtaaatggttttgcactcgccttgcaggtcggcctgcagatcggggttactggtttccagctgatggcgagtgttcaggtagtaccccccttccgtcacggtaaaggcgataactttggtctgcgggtttgccccttcgttaatcagcggctgtagcccggcctgccacggcagcagtttctggattgaggtgatctcttcatattcgcgctccccttccgggctgacggtctcgaggacgtaacgtcctccctgcgccgccagcgcctggaccacctgctcggcgtcgttgcgaatattccccgccgcgatgcgccagcgattatccccggaagcaatcagacgatgcagataccacgcctgatgcgcgcgatgaaaagaacccagaccgatatgaagccatgtgaattgattgttcatgttctgctctccttgagttgatggcgccactgtaattgatcatttgacctaaataagagccatagatcacaaaagagcaattacccaattaaattacaaatgaccagaaaagagcaaaagcttgccagttatgccaaccacggcgagaatgcgggtattcgccgggccaattgcgtgccctggccagcaacttagggcgggaaaccatgagtaaagaagacgatatccggttggatcagaaggtgcgtgccgcatggatgtactacatcgccggccagaatcagagcgagattgccagccagctgggcacctccagaccggtggtgcaacggctgatcgccgccgcgaaagaagaagggattgtgtcaattaatctgcaccatccggtagcgaactgcctcgattatgcgcagttgctgcaggaaaaataccgcttgatcgagtgcaatgtggtccccgcctttagcgaagaaagcaccctcgacagtgtgtcatttggctgctatcagctgatggctcgctatctgcaggatgataaagagaaaatcatcggtctgggctcgggcctgaccctgaaaaaagcgctgcagcgcatcgattttgacagcctgaatacccgctgcgtggcgctgatcagcgccatgaacgccgacgggcagtgcaattattacgatgacgtgcccctgctgctgacccgcaaaattaaggccaagtactatcagtggccggcgccgcgctacgcccaaagcgcggatgagtatgaaatgtggtgcaccaatcgcttattccgcagcgtctccggcgtcgcccgcgaggcggacgtgatttttgtcggcattggtccgctgggcacgcaaagtccgatctttaaagatggctttatcaatcaggcgcagatggatgagctgaccgcccgcggcggcatcggggagatcctcgggcggtttattgatgcgcaaggcgacgtggtagacagcgagatcaaccgcatgatcaccagctatgatatccgccagagccactgcccgcggattgccgctgcctgtggagaacataaacgaccggcgatcctggccgcccttaaaggcggctggatcaatggcctggtgaccgatgagcataccgcccgctggctgctgacgcggtaacgtttaacagccagacagcgactcagctgctgctcatcagtcgcgggggaatttcaatccgctgctggctggcttcgccggcgtcaataatcgaaaaaacagcgtccagcatcgccggcacgtcctgctgcaccatgtcgatatcgtgccccagcaggtagacaaaaggatcccagtcgaagcagcccatcggcggctgctcgctgccggtcagacccacctgcgacagccagcgcacaaccccttccagggatatcgtcgagttaacaaatatcccctgcaacaacgtcttcgcgctgccaaaccgctcctgcaggcagtcctcaacgtgtcctttcgaatagccgggagccagaatattcgcctgcggcacgctaagccccagctcgcgatgcgcatcgtggaagccgcgtaaacgctcgctggtgttatggtcgctgctgcgccctccgataaaggtcagcggcgccagctctccgcggcggcgggcgctattagccaggatcttatgagtcagcgctttcgcgccgccgtagttatccgaaatcaccgacggcgagagagagcccggcaggtcgagattgaccgttggcacgcccgcctgctggcatagcgcggaaattttatccggattggtcgccccggtcgcgaccacccagtcaacctgccaggagagcatcgcctttaccgcttctatctccagttccggacgccggcgcgtacaggtgataatcggcagcaggccgcgctcgcgggccatctcctcaaagcgttcggcgatggaaccgaagtagcggttatcatatttggggataatcataccgatgacgtgtgattttttactgcgcagcatgctggcctgacggttaatcgcatagccctgctcctcggcaatccgcgtcaccttttccgcaagcttggcgctgatgcggcgctttttccagttaccgttgaggatagcgctcaccgcgctcgccgaaacgccggaaagttccgccaggtcgtaaatcgttatcttcttcatttttccaacttgcgtcacaaaatcatgtcgctgttaatttccccacttgctcaatcgatgaagcgagagcaacatagcttcatcgattgagcatccttttcacgccaggaagtacgcgcgcataccgcctcaacatgccagcaagcctgaattaagatgctgatattcaatatgttaccaggtttagtctatcacctcgaacgtgatgccctcgcgttcgatagttttaaccagacaaggcaaaggattataaaatgaaccactctgtctcctctatgaatacttccctcagcggtaaagtcgccgcgatcaccggcgcggcgtccggtatcggcctcgagtgcgcgaggaccctgctgggagctggcgcaaaagtggtactgatcgaccgcgaaggcgaaaagctcaacaaactggtcgccgaacttggcgaaaacgccttcgccctgcaggtcgacctgatgcaggcggaccaggtcgataacctactgcagggcattttgcagcttaccgggcgtctcgatatcttccacgccaacgccggcgcctatatcggcgggccggtggccgagggcgacccggacgtctgggaccgcgtgctgcaccttaatatcaacgccgccttccgctgcgtgcgcagcgtcctgccgcatctgatcgcgcaaaaatccggggatattatcttcaccagctcgatcgcgggcgtggtgccggtgatctgggagcctgtctataccgcgtcgaaattcgcggtgcaggcatttgtacacaccactcgtcgccaggtggcgcagtatggcgtgcgcgtcggcgccgtactgccgggcccggtggttaccgctctgctggacgactggccaaaagccaaaatggacgaagcgctggccaacggcagcctgatgcagccgattgaagtggcggagtcggtgctgtttatggtgacgcgttcgaaaaacgtcaccgtgcgcgacattgtgatcctgccgaacagcgtggatctctgaccctggccagcctgtgagaggatgtgatgcaaaacgatacgcaaaacattattggcgtggatgtcggttcgggcagcgtgcgcgccgggatattcaatctacggggcgagctcctcgcccacgcgacccgggaaataaccctgtttcgcagcgccggaaataaggtcgagcagtcgagccgtgagatctggcaggcggtgtgctactgcattaaaacggcggtggccaacgccggcgtttcgccgtcgtcgatagccgggatcggcttcgatgccacctgctcgctggtggtgattggcgataacgatgcgccgctggcggtcgggccttcggacgatgcggaccgcaacattattgtctggatggatcatcgcgccaccgggcaggcggaaaagatcaatgccacgggccacccggtactgcggtacgttggcggcaaaatctcgccggagatgcaaacgccgaaaattttgtggctgaaggagaatcgcccgcacatctatcagcaggcgcgccacttcttcgacctcgccgattacctcacctggcgctcaaccggcgatgaagcccgctcggtctgcacggtgacctgtaaatggacctatctggcgcatgaacaacgctgggatgccggttacttccgccagattggcctcgaagagctggcggatgaagattttgtccgcatcggccagcggattgtcgatccaggcaccccctgcggcgacggcctttgcgccacggcggcagaggagatgggcctgccgatcggcacgccggtggcggtggggatgattgacgcccacgcgggcggcatcggtaccgtcggcgtgcttaacggcgcggtcaacaatatggcctatgtcttcggcacttcttcctgcaccatgaccaccactcaggaagcggtattcgtcccgggcgtctggggcccttactattcggcgatggtgccgggctactggctaagtgaaggcgggcaaagcgccgccggcgcggctatcgaccagctgctgagcttccatccggcggcggcggaagcgcgcgagcaagcgaaagccgcaggcgtccctctaccggtctggctggcggatcgcgttctgacgcaagttgcttcgccttctgaagcggtaacgctggccgccggtctgcacgtcgttccggagtttctcggtaatcgcgcgccgcttgccgatccccacgcgaaagcgctgattgccgggctggggatggagcgggacctggataacctgaccgcgctgtacgttgccggcttatgcgggattggctatggtctgcgacagatcattgacgcccagcgcgcctgcggaattgagagtgaaaatatcgtcatcagcggcggcgccgggcagcatccgctggtgcgtcagctgttggccgacgcctgcggcgttagcgtcgtgagcaccgccagccgcgagccggtgctgttaggttccgccatcctcggcgcggtggcgggcagagtcgcggcttcgctgccggaggccatgaagcagtttactcaggtggatgccacctatcacagcgagacggcgtttagcccgcttcatcagcgcaggtatgcggcctataaggcgctacaacaggccggcaggctgattcgcgaataacatacctccttattttataacaataatgctccgctgctgtgcagcggagacactcatctgcactctgaaatcgaggtcaacatgtccgttaataacaaacagtggtacggtctaccgctcaacctcatctggggatatgtcgccatcgccgtgtttatgaccggcgacggctttgagctggcttttctgtcgcactacatcaaagcactcggattcaccccggcgcaggcttcctttgcctttaccctctacggtctggctgccgccctgtcggcgtgggtctccggcgtggtggcggaaatcattaccccacgtaaagccatgctgattggcttcgtgctatggtgtgtattccacgtactgttcctcgtcttcggcctcggtcgcgccaactatgcgctgatcctgctgttttatggcatccgcggcctggcctacccgctgttcctctactcctttatcgtcgccattatccacaacgtccgcagcgacagttccagctccgcgctgggctggttctgggcggtctactcggtgggtatcggcgtgttcggcagctatattccgagctttaccattccccacattggcgaaatgggcaccctgtggctggcgctgctcttttgcgccaccggcggcattattgcgctggtgtcgatgcgtcataccgaaacgccgcgccatatgcagaacctgaccactcgtgaaaaattcgccgaactggggcgcgccgcgacgctgctctataccaaccgcagcattctgttctcgagcattgtgcgcattatcaacaccctgtcgctgtttggttttgcggtgatcatgccgatgatgtttgttgatgagctgggatttaccacctcggaatggctgcaggtatgggcggcattcttcttcactactatcttttcgaacgttttctgggggattgtggcggagaaaatgggctggatgaaggttatccgctggttcggctgcatcgggatggcgctttccagcctggcgttctattacctgccccagcacttcggccataattttgccatggcgctggtaccggctattgccctggggatttttgtcgccgcgtttgtgccgatggcggcggtgttcccggcgctggagccgaaccataaaggcgcggccatttcggtctataacctgtcagccgggctgtcgaactttctggcgccggcgattgccgtggtactgctgccctatttcagcactatcggcgtggtaatagcctataccgccttatatattctggccttcttcctgtgcccgttaatccgcgttgaacagcctggctttaccagcgatcagcatgcgaaaccgtttaccgccaacgcggcagagtcttaataaaccgcatctggtacaaacaacgagcaatccgggcggtgccgcccggatttttgccttatgcgatagtcactttgccatccagataaacatcctgcacggcattgatcagcttcacgccgtcggccatcgatttcttaaacgctttgcggccaaggatcagccccatgccgccggcgcgtttattaatcaccgccgtgcgcaccgcgtcggcaaggtcggtctccccgcccgccgcgccgccggagttgatcagcccggcgcggcccatatagcagttggccagctggtagcgcaccagatcgatggggttatcgctggtcagtttgctgtacacccgatcgtcggtatagccgaagttaaccgctttgtagccgccgttattctccgccatcttttgcttaacgatatcggcgccgatggtggccgccaggtggttggcctgaccggtcaggtcagcggaaacatgatagtcgacgccgtctttcttgaacgccgaattgcgcagataggcccacagcacggtgaccaggcccagctcatgggcccgctcaaaggcggcggaaatctcttctatctgacgacgcgattgttccgagccgaaatagatcgtcgctcccacggccaccgcccccatattgaacgcctgctcaacgctggcgtagagggtctggtcgtattcggtgggatagctcagcgtttcgttatggttgagcttcaccaggaaagggatgcgatgcgcgtagcggcgcgacaccgaggccagcacgccgtaggtcgacgccacgcagttacagccggcttcgatcgccagctcgacgatatttttcggatcaaagtacagcgggttggcggcaaaggaggcgcccgccgagtgctccacgccctggtcaaccggcagaatggaaaggtagccggttccccccaggcgtccggtattgtacagggtctgcatattgcgtagcaccgccggtggtcggttgttatccaccatcacccgatcaacataatctgcgccaggcagatacagctggtcggacggaatggttatacaacggtgctgcaacaggctctcggcatctttgcccagcaactgcgtaatatcagtcatagcaatctcccgtaaggccggccgaagccggcatgcattatcccaacccaatttttttgggcaggttaagcctggtaccgacttagcctattttccagccggggggccattttttcaggagattctgctgtcccgttgcgctgccatttaccaccaggcgtggaaatggtgcaccggcccgataccgtggcctacctccagagagtcggcctgtgccagagccgccgacagccaggccttcgcctcgataacggtggccgcccagtccgcgtgacgcgggcgcagcgccgccagcgcggcggagagcgtacagccggtgccgtgggtatttttggtctgcactcgcggcgcggtgaaccgctgttccccttcgcgggtgaagagccagtccgggctttcggcatcgtcgagatggccgcccttcatcaataccgcgccgcagcccagcgccagcagcgcccgcccctgctccagcatttcccgttcgttacgcgcatggggggcatcgagtagcgcggccgcttccggcaggttcggggtgatcaatgacacctgcggcaacaatcgttgacgcagggtctctaccgccgaagccgacagcagcggatcgccgcttttcgccagcatgacggtatccagcaccacgttggccacccggtagcgcgccagccgctcggccacggcttccacaatatcggtctccgccagcatgccgattttggtggtatcgatacgcacatcgctgaacaccgagtcgagctgcgcggccacaaaatccggttcgatgcgatagaccgactgtacgccgcgggtattctgcgccaccagggcggtgatcgccgagcagccataggcccccagcgcggagaaggttttcagatcggcctggataccggccccgccgctgggatcggtgccggcgatggtcagggcgttgatgcgtttcatccctgcacctcctgatacagcgcgtcgagaaacgccggaataaagctgcctgggcctccctgacgggcggcgatcgccccggcctgcttcatcagcccgcaggcggcggccacgttttccagccggtctcccggtagcgccgcgctcgccgccaccaccgccgacagcgcgcagccggtgcccaccacccgggtcatcagcggattgccccccgccacgctgagcacccgctcgccgtcggtgacgtagtccacctcgccagtgaccgccaccacggtagccagccgacgagccagcgcctgggccgccggcagcgccgctgcggccgtatcggtggtatccaccccgcgcccgccggcgctcatcccggccagcgccagaatttcagaggcattgccgcgaatggccgccggctggagggccagcagctcgtgacaaaaggccgtgcgcacggtcagggcgccgaccgccaccggatccagcgtccagggcttgccggcctgacgggcgtgctccaccgcggcgcgcatcgccacggcgcgatcttcggtcagggtaccgacgttaattaacagcgcatcagcgatagcggcaaattgcgccgcttcgcggggatcgatcaccatcgccggcgaggcgccgacggccagcagaacattggcggtaaaggtctgcaccacgtcattggtcatgcagtgcacaaggggggaatgggcgcgcagcagatggcgcaggtgcgcgacaggcgcgggattcaacagctcaggcatagtttgctcccgccagacgaggtagaagcaatgaccctgcggtctctgacttccctacgctggcattatccagatcaggtggtacgggtatttctcagccttcaacgaagaagggcaccccgagtcaaaatagtgaaattgttaagcgttgtggaatttaccgcaactcaccggttcatacaacaagcctttagccctggatacgacaccttcgcggccatcatgctcatcaggcgaccgggcgggattgcattccgctgctggcgggcggaaaataatgacatcatgcgctatttagcctaccgaggatatacgccatggccgtttatcaccatgcgctggtactgattaacagcagtcaggacggcgtcccgctgctccagcatgccgccagaatggcagaagagaacggcatgcgcatcaccatcgcccacatcagcaccgattaccgggcgctgaactatgtttccgacagcctgcgcgacgatcgggtctcgcaggaggtgatccaggccaaagccctgctcaacgagctggcctgcaccgtctccctgccggtggataccctctcgctggtgaccacccgccggtttgaagacgtggaaacctgcgttcggcagcggcagatcgatttaattattgccgggcaccataaccggttgctgggcgtcctctcctcacactcgctggagtacatcaaccacttaaacctggacgtactgatcaagcacctgccctagcgcaaggcggcctgcagcagagaaaaacagtcttcaattagcggaggcagcgcctgcgggccgcgcatcagggccactgtgcgggcgagcgccggctgctgcaggtgggcgaccctgagcgccgggtcctgcagatgggtggtgtacagcgccggcagaatcgccaccgctaagcgcgagcgcaccagaccatacagggtttcgatatagtccacctggtagcgggtggtcagcgtcaggcgatggctctccactaatgccgccaccagccgctggatattgcccttcgagaacacagcaatatcccgccccaccagctgtttccacggcagatgtgcctgcgcggccagcggatcgtcgcggtgcagcaccgccacgaagggatcttcgcgtagcggatagaccagcagttctgcgggcagtgagctgtcgatcgccccgatgccgaaatcaatctcgccgcgctgcagcgcctggataagcgcatcgttggtctgatcgtgaaattcaatgcgcagacgcggaaaggcctcagccagggtctgcggcagcagcggaaacagcagcgaactgaccgacggcaccagaccgatacgcaccgtcccgtcgccgcccgcctcgacaatctgctgcatatcggaaaaggccgcctgcgccacgctgaggatccgctgggcgtggggtaaaatcgccgcccccagttcagtcagagtgaccgtcgcagcggtacggttgaccagtttgccgccgagtaccgtttcaatctgccgcagggcgctgctcagcgccggctggctaatcgccagccgactggcggtatcggtaaaatggcgcagctgggccagggtgacaaaatactgaagctgtttaagagagagcgcgggcagccgctgccagggttcgttcatcatcgggttcgctacggtggtcctgcacaataacccgagcttatcgggtgataaatttattcatctgggcaaacgtttgctgtgcccctagagtatccgcattatccttgtgccggagtggttatgtccagcaatgctcaagtccgccgtcgcgccgtgcaggccgcgcgcggtgaatccccgtttgatctgctgctgatcgatgcgcagatcgtcgatatggccacgggcgaaattcgccccgctgacgtcggtatcgtcggcgagatgatcgccagcgtccatccgcgcggcagtcgcgaagacgcccatgaagtgcgttccctggccggtggctacctgtcccccggcctgatggacacccacgtgcatctcgaaagctcacacctgccgccagagcgctatgcggaaatcgtcctcacccagggcaccaccgcggtgttctgggatccgcatgagctggccaacgtcctcggcgtcgctggcgtgcgctatgcggtggacgccagccgccatctgccgctgcaggtgatggtcgccgccccgtccagcgtcccctccacgccgggtctcgaaatgtccggcgctgatttcgccggcgcggagatggagaccatgctcggctggccggaagtgcgcggcgtggcggaggtgatggatatgcacggcgtgctgcacggtagcgagcggatgcaggagattgtccaggccggtctcaacagcggcaaactgattgaaggccacgcccgcggcctgagcggcgctgacctgcaggcctacctcgccgccggcgtcacctccgatcacgaactgacctcggcggacgacgcgctggaaaaactgcgcgccgggctgacgatcgagatccgcggctcgcacccctatctgctgccggatatcgtcgcggcgttaaaaacgctgccgcacctctcctcgcagatcaccgtctgcaccgatgacgtgccgccggatatactactggagaaaggcggcatcatcgccctgcttaatctgctgatcgagcacggtttaccggcggtcgatgcgctgcgattcgccaccctcaacgccgctattcgcctgcagcgccacgatctcgggctgattgccgccgggcggcgcgccgatctggtggtgtttgattccctggagaaactggtggcccgcgaagtctacataggcggtaagctgctggcccgcgcgggcaacctgctgacaccgatcgcgcccgccgcgggcgtcacgccgccgcgcgatactttgcagatcgcccccctccgcgccgatgactttattctgcgcgtccagggcattcgtcacggcatcgcccgcctgcgccatatccgcggcgcgcgcttcacccagtggggcgaagtggaagtgcaggttcgtgacgggatagtccagctgcccgccggcttcagtctgatctgggtcaagcaccgccacggccgccatcaggcgacgccgcaaatcgccctgcttgaaggctggggtgagctgcgcggcgccatcgccaccagctactcccacgactcgcataatctggtggtgctcgggcgcgacgctaatgatatggcgctggcggccaaccagcttatcgcctccggcggcgggatggcgctggcgcaacagggcgagatcctcgcccatgtggcgatgccgattgccggcatgctgtcggatctcccggccgcggaactggcgcgtcagttccgcgagctgcgcgatctgagcagccaagtcgccgactgggagccgccgtaccgggtcttcaaagccattgaaggcacctgccttgcctgtaacgccgggccgcatttaaccgatttgggtctgaccgacggcggcagccgccagatagtcgacccgttgatagcctgccgggagatcccggagccaaccgatcacaacaataatcctcagggagcctgagcatggccgataacacacttcactcttccgcccgcgctaactggctggagcgccgctttgcgctgcgctcgcgcggcggcacgctacgcaccgaatgcctggccgggatcaccggctttctcgccgccgcctatttactggtggttatcccggggctgctggcgatcggtgggatggataaaggcgccgccaccaccggcaccattctggtcttcgtcgtcggctcgctgctgatggcgttttatgccaacctgccgtttatcgtcggcccgggcattggcggctcggtgctggtgggggtgacgctggccggtagcgaagggattggctggcagactggcctcggaattgcctgctggtcggggatcctcttcttcctgctgacccgctttggcctgcgcgaagtggtcacccgctcggtgccgcagtcgatcaagctgggattgacggcctccatcggcctgtttgtcgccgtcctcggttttcgcaatgccgggctggtgctggccaatgcgaaaaccaacgccctgatgctcggcgactttctcgcccccggcgcgctggtggcgctgtgcggcctgttcctggcgatagccctgcaggcgcgtaaggtaccgggcgcgattttgtgggctattttgtgcgccacgctggtgggtatcccgttcggcgtgactaaactgccgacgcattttatcgatgccccccactcgctggcgccggtgctgggacaggttgacctgctgggggcgttaaacatcgccttcctgccgttcctgttcgtctttttcgcatctgagtttttctccaccatggggacaacgctggcggtgggcggcgaggcgggtctgctggatgaagaaggcaacatgccgcagattaatcgcccgttcatggtcgattcgattgccgccgcgctcggcccgtggctgggcattccggcggcgacggcgctgattgaatcttcggcggcagcggaagcgggcggcaaaaccggcctcaccgccctgtcggcggcggtaatgttcctgctgatgctgctgttcacgccggtggcgttgatgatcccgaaagaagccaccgccccggcgctgatcctgattggcctgaacatgttcagcggcctgcgcaaagtggatcttgccaacttcaccgacgggctgccggtgctgatgatggtgatgatcacccttatcgccaacagctttggcaccgggattgccggcgggctgctgttttacattgtgatcaaggctatcgccggtaagtggcgggagatcccgattggcctgtgggtattggccgtcccgctggtgtattacttcgcgaccttagtcaggcattaagcccttcacaatgtgatttcacctcttcatataacaaacgcaccgcggcagagagctgtttgcggtgcggacaaatcagattcaacggcactacatccccctgataacgcggcagcaggcgccgcaggcgccccgcccgcagatcgtcgctgacgtcgagcatcgatttataggcaatgccctccccggcgatcgccagccgacggatcacctcggcgtcgtcgctcatcaccgtgccggaaaccttctgctgctgaaccacgccgtcgaggctcagcgaccagcggtcgaacggacggccgcgcaaaatgtagatcaacgcattgtgctggctgagttcctcgagggtctgcggttcgccatggcgggcgatccactcaggcgaggccaccagcacccgacgattttccggcgccaccggcagtgagataaacgaggcatcgtcgttattgccatagcgaaacgcaacgtccaccggatctttaaacacgtcggtcagttgatcggaaaagagcagccgcaggcgcagcgccgggtggcgttggcggaaatcgcggaacagggtcaggagcaggttacgcccgaggtccgacggcacggcaatctgcaacatgccgcgaacttcatcgtccggggtctggatcttctgcagaccggcctcgagggtatcgagcatctgggtggcgtagggcagccaggtctctccctccggcgtcaggcgcaggctgcgggtcgaacgggcaaacaggcgaatattgaggatcgtctccagacgcttaattgccgcgctgacctgcgccggctgctgcccggcctcgcgcgccgcgtcgctaaaactgcccagcgccgcggcgcggacaaataaggtcagatcttccagcctgaacatgccgattctcccctgcttcagattgctcccaaaatacgcatcaccgtcgctgcaacgcaagcggcacaagacttgcgccgcgttttgcttacactttttaaaaatccagtgcttgccatttcagcaacgcatcaggaatgatacgaggctgctattttgagtccaggtaatattgaggaaactatgcgtaaaacaaaaatgatgcttctgggcgtacttcttgccaccgctggcgccagctggacggctactgccgcggggatcgatcagtatgcgctgaaagagttcaccgccgatttcacccagtttcacatcggcgacaccgttccggcgatgtatctcaccccggaatacaacattaaacagtggcagcagcgtaacctgcctgcgccggacgccggcagccactggacctatatgggcggtaactacgtgctgattaccgataccgaaggcaaaatcctcaaagtgtatgatggcgagatcttctaccatcgctgatccgcgcaatctccacgtccgccccggcgagccagcggactctccggcgctgcgccagatcttcctgcgggcgcgcagtttatcgtggacctggcttcccgccgcggcgtggcggctggaggatttcgatgccgccaccgcggatgaacagctgtgggtcgcggaatgcgacggccagccggtgggctttgccgccgtatggaccgccgataatttccttcaccatctgtttgtcgaccccgactggcaaggcaaacatatcggcagcgcgctgctggcgcaggtcgaacggacctttaccgctagcggaacgctgaagtgcctgatggaaaataaaaacgccctgcgcttctaccagcgtcatggctggaccattgaagcacagggcgcgtcgcccgagggcagatactggctgatgcgctcgccgcggccttaaacggcgcggaaggcaatctcaccggggatcacttctccctgccagtacatctgggccgccacccggcccgccagctggcggtagatgtcggtaaattcgctgtccggacgcgccaccaccgtcggcgtgccgttatccagatcttcccgcagcgtaatatgcagcggcagctggcccagcagctgggtgtggtatttctcggccagtttttgcgcgccgccggtgccgaagataggctcgtggtgcccgcagttgctgcagatatgcatgctcatgttttccacgatccccagcaccggcacttccactttctcgaacatcacgatgccttttttggcgtcgatcagcgcgatgtcctgcggcgtggtgaccaccaccgcgccggtcaccggaatgttctgcgccagggtcagctggatgtcgccggtgcccggcggcatatccagcaccaggtaatcaagatccggccacagggtctcctgcagcatctgcatcagcgccttgctggccatcggcccacgccagaccatggcgttgtcgtcggtcaccaggtagccgatggagttggttgccagaccatatttcatgatcggcgccatatgagtgccgtccggcgaggtcgggcggctgtcttccgcacccagcatggtcggaatcgacggaccatagatatcggcatccagaatgcccaccttcgccccttccgccgccagggccagcgccaggtttacggcagtagaagatttaccgacgccgcctttgccggagctgatggcgataatgtttttcacgccgttgaccccgggctggtttttcacccgtttgagggtcgcgatgctgtgggtcagcttccagtcgatggccttcgcgccggtgatgcgcagcagttcggcgctgcactgctctttcagcgcttcgaaagcgctgctccagacgaacggcatttgcagttcaatatggacggtatcgtccagccaggcgacatggtgcagcgccttaagggcggtgagattatgcttcagggttgggtgctggaaattggccagcgtcccggcgaccatcgcacgtaggcgctcaggggatttggcctgggattgcgaattcatcccgactcctttgttgttttgagatgctttcagtaatcacagagtttatcacaggtaacgattatccatatatgggcagccatttatggcgcacccacagcccttttggtaatatcggaagccctttttacaacagaagatgtaatgctcactatgactcaagtcgcgaagaaaattctggtaacgtgcgccctgccgtacgccaacggctccatccacctcggccacatgctggagcacatccaggctgatgtctgggtccgttaccagcgaatgcgcggccacgaggtcaacttcatctgcgccgacgacgcccacggcacgccgattatgctcaaagcgcagcagctcggtatcactccggagcagatgattggcgaaatgagtcaggagcatcagaccgatttcgccggcttcgacatcagctatgataactatcactcgacgcacagcgacgagaaccgcgagctgtcggagcttatctacacccgcctgaaagagaacggttttattaaaaaccgcaccatctctcagctctacgatccggaaaaaggcatgttcctgccggaccgttttgtgaaaggcacctgtccgaagtgcaaatctccggaccagtatggcgataactgcgaagtgtgcggcgcgacctacagccctaccgagcttatcgacccgaaatcggtggtctccggcgccacgccggtgatgcgtgactccgagcactttttcttcgacctgccgtcgttcagcgaaatgctgcaggcgtggacccgcagcggcgccctgcaggagcaggtcgcgaacaagatgcaggagtggttcgaatccggcctgcagcagtgggacatctcccgcgatgcgccgtacttcggcttcgaaattcccaacgcgccgggcaaatatttctacgtctggctggacgcgccgatcggctacatgggctccttcaagaacctgtgcgacaagcgcggcgacaccaccagcttcgacgaatactggaagaaagactccacggccgagctgtatcactttatcggcaaggacattgtctacttccacagcctgttctggccggcgatgctggaaggcagcaacttccgtaagccgactaacctgttcgtgcacggctacgtgacggttaacggcgccaaaatgtccaagtcgcgcggcacctttatcaaggccagcacctggttaaatcatttcgatgccgacagcctgcgctactactacaccgccaagctctcttcgcgcatcgatgacatcgacctgaacctggaagatttcgtgcagcgcgtgaacgcggacatcgtcaacaaggtggttaacctcgcctcgcgcaacgccggctttatcagcaagcgtttcgacggcgtgctggccgctgagctggccgacccggcgctgtacaaaaccttcaccgacgcggcggaaagcatcggcgaagcatgggacagccgcgagttcggtaaagcaatccgcgaaatcatggccctcgccgacgtggctaaccgctacgtcgacgagcaggcgccgtgggtggtggcgaaacaggaaggccgcgacgccgacctgcaggccatctgcaccatgggcctgaatatgttccgcgtgctgatgacctggctgaagccggtcctgccgcagctggccgcgcgtgcggaagcgttcctcaacagcgaactgagctgggacgccattcagcagccgctgctggcgcataaggtcaatccgttcaaggcgctgtacaaccgtatcgagatgaagcaggtggaagccctggtagaagcctctaaagaagaggtgaaagccaccgcggcgccggtcaccggtccgctggcggacgatccgattcaggagaccatcacctttgacgatttcgccaaagtcgatctgcgcgtggcgctgattgaaaacgcggaattcgtcgagggctccgacaagctactgcgcctgacgctggatctcggcggcgaaaaacgtaacgtcttctccggcatccgctccgcctatccggatccgcagccgctgattggtcgcctgacggtgatggtcgccaacctggcgccgcgcaaaatgcgcttcggcatctccgagggcatggtgatggccgccggccctggcgggaaggatatcttcctgttaagccctgacgacggcgccaagccgggtcagcaggtgaaataacaaaaaagccggagagtatctccggcttttttttgcccggcggcgctatgctagcacgcgcccgggggcagtcgttgtaggccgggtcaggcgaagccgccacccggcaaaaaatcatgccttcgggttatgcacccgctgggtcagtccgcgcaggaaattacgcagaaactggtcgccgcactcgcggtagtttttgtggtcaggcgagcgcatcatggcggtgatctccggcaccgacacccggtatttctgctcgctcataatcgcctggatatcgtccgttttcagcgagaaggcgatccgcagctttttcagcaccgtgttgttattcacccgacgctccagcgccagctccggggccgaatcatctttgccgcgcttgtcatagataaggccgttaaggaaacccgacaggataatgtccgggcagcgaacaaagccctcttcatcctctttcgtcgtccaggtgtcgaagctggcggcggtggattccatagcggagagcgcgagaatgcgcaccatatcgttattattgactttcagggtgtagcgtaggctacgaagaatatcattactgagcatgagggccttttactgtcgatgatgcaatggggcgcagtgtaccagctttacaggccaatcgcctctttcaggctttttaaatagcgccggctcaccggcaccgtttgcccggcgcgcatcagcagctccgcctggccattctcctccaggcgaatctccttcaggtgcgccatattcaccaggtactggcgatggcagcgcagcaacggcgtgcggctctcaagggtgcgcagggtcagttcggtaaagccctcttttccctcgcggtcggtcacgtagatgccgctcatccggctgctgacgaaggccacatcctccatctgcagaagccagatacgactgtggccggtacagggaatgtatttcagcgtctgctgagcatcatccagcagcgacacatcctgcagattacgctcctggcgcaggcgggcgagggttttctccagccgggcagcttcaatcggcttcagcagatagtcaaaggcatgctcctcaaaggctttcaccgcgtattcatcaaaggcggtgagaaacacgatataggggcggtgctccgggtcgagcatcccgaccatctccagaccgctgatgcgcggcatctggatgtcgagaaacagcacgtcgggacgcagcttatgcaccgcgccaatggcctccaccgcgttgccgcactcgccgacgatctcgatatcgcgctgtgtctccagcaaaatgcgcaggttttcccgcgccagcggctcatcatcgacgatcaatactctcagcatgcattctcctccaggggcagacgtagggtgacacgggtaaagcgctccggctcgcaggtgacgctgatgccgcagtcggcgccaaaacgcgcccgcagccgcctgtccaccagattcatccccagcccgctggcctgggggttggcccggtacagcccggcgttatcttcgatatccagctgcagccagcgatcgtcctggctggcgcggatggtaatttcgccgacgccaagatgttgcgatgtaccatgcttaatggcgttctccacgatcggctgcagggtaaaggccggcagctggtgatgcgccagcccttccggcaccgccatctggatctgcaggttagcctgaaagcgagccttctcaatctgcagataggcgttaacatgctcgatctcatcggcaagagtgacaatttccgtcggccgtttcaggttcttgcgaaagaaggtcgacagatactgcaccagctggccggcctgatcgctgtcgcggcggatcaccgccttcagcgtgttaagcgcgttaaacaggaagtgcgggttgacctgggcgtgcaggagcttgatttcggattgcgtcagcagcgccttctgccgctcgtactgtccggcgaggatctgcgccgacagcagctgggcaatcccctccccgagggtgcggttgatcgaactgaacaggcgatttttcgcctcatacagtttaatggttcctatcacccgttgattctcgccgcgcagggggatcaccagcgtcgaccccagcttacagtgcggatgaatcgagcagcggtaaggcacctcgttgccgtcggcgtagaccacctccccggtctcaatcgcccgttgcgtatacgaggaggagataggcttgcccggcagatggtgatcgtcgccgatgccggtaaacgccagcagcttgtcgcgatcggtgatcgccaccgcaccgatatccagctcctggatcagcacctgggccaccttcatgctgttctcttcgttgaatccctgacgcaggatcccctcggtggacgccgccaccttcagcgccgtggcggaaaaggcggaggtgtacttctcaaacatcgcccgcttgtccagcagaatgcgcataaacagcgccgcaccgacggtattggtgaccatcatcggcgcggcaatgctctgcaccagatgcagggcgtcctggaacgggcgggcaatcagcagaatgatcatcatctgcaccagctcggccaccaaggtgatcgccccggcggtcagcgggctaaagactttgtccggccggccgcgtttgaccagcacgctgtgcaccagaccgcccagcagcccctcaacgatggtggaaaccatgcagcttaaggcggtcattccccccagcgagtagcggtgcaggccgccggtgagccctaccagcccgccgaccaccggcccgccgagcaggccgcccatcacggcgccgatggcgcgggtgttggcgatcgagtcttcgatatgcagaccgaaataggtccccataatgcagaaaatggagaaagtgacgtagcacagcagcttgtgcggcaggcgaacggtgacttgcatcagggggataaacagtcgggttttgctcatcaaccacgcgatgaccaaaaatacgcacatctgctgaagcagcagcaacaccagatcaaactcgtacatacccgcaaaccacacatgcctgaaagcgcgtaccataccctgcctggcgaaaactttctttgaagccctgcataaaaatgaaaaatgacggccaggatcacacttttttgcggcgcgttgcgcagcaaacgcggcaaaaaccccggcgcggcgcgctaaaccgcaattaatgtttcattaacacctgcgcttcaccgtataatccccctgttaacatcaggagcctattatgaagccagcgaaaatcgcggtcgtcaccctcttcttacttatggccatcggcgggatcagcggcgtaatgctggccggctattcctttattgtgcgtggcggtgtcggctgatccagcgggtcagacgctcaaacgcgcggtcgacgataatcgccgccagcgccaccagcagcgccccctgtacaatataggcggtattaaagccgctcaggccgatgatgatcggcgtcccgagcgtactggcccccaccgtcgaggcaatggtcgcggtaccaatattgacgatgaccgaggtgcggatccccgccaggatcaccggggccgccagcggtagttccaccttatacagacgctgccagccggtcattcccatcccttcagccacgcctgacaccccaggcggtatcgaacccagcccggccagcgtcccctgcagcaccggcagtatgccatacagcgcgagggctatcagcgccggcagccagccaaagcccagcaccggcaccgccatcgccagcaccgccaccggcggaaaggtctgcccgatagcggcgatggtctccaccagcggacgaaacgcgctgccggcgggccgggtgaccgccaccccagcccccagcccgattgccgttgccgcgaggctggacgccaccaccagccagccgtgatcgagagtgagcgcccagaagctctcctgctggtagaccggccgcggcagttccgggaacagccgactgaacagcggcgcgctgtagggcagccctgccagcaggccgataaacagcgcgataagccaccacagcggctcacgaagcgccttcatggctcatctcctggcgcagcagatcggcaaaatgcagcgtaccgcagggcctgccttcggcatcgaccaccggcagcgtctcgcagcgccgggcgacaaactgcgacagcgcttcccgcagggtcatggtgacggtcagcccctcgcccgccagccgttcgtcgggacgcaaatagtcccccacctcgcgcagcgacagcaggcgcacacccagctcgctgcgaccaaaaaaggtctgtacaaagctatttttcggtcgcaggagcatctccagcggcgccccctgctggaccacctcgcccccgtccatcagcaccaggtggtccgccagacgcagcgcttcgtcaatatcatgggtcaccagcacaatcgtccgtcccagcagacggtgaatgcgcagcatctcctgctgcagcgcctcgcgggtcaccgggtcgagggcgccgaagggctcatccatcaacagcacctccggatctgccgccagcgcccgcgccacccccacccgctgctgctggccgccggagagctgatgcgggtaacggtcgcgcagcgtcgcctccagccccagcagcgccatcagctcgtcgatccggtcggcgatccttgcccgcggccatctttgcaactgcggcacggtggcgatattctgcgccaccgtccagtggggaaacaggccgatggactggatggcatagcccatccgccgccgcagggtcaggaccggctgctggcgaatgtcctcgccggcaaagcgaatggtgccccggtccggctccagcagacggttgatcatcttcagcgtcgtcgacttgcccgagccggaagtccccaccagcaccgagaaagcgccttcgcgcagctccagggtcaggtccttcaccgccgggtggccggcaaacactttgctgaccccttgaaattcaatcattggcctctccttttagccaggcgccccacagggcgaacagggcatccaccaccaccgccagggcaatggtcggcaccacgcccagcagcaccagatccagcgcactgctcagcagcccctgaaaaaccagcgcgccaaagccgccggcgccgatcagcgcggccactaccgccatgccgacggtttgcacgctgaccacccgcaggctgcgcagcagtaccggcatcgccagcggaagctgcacctgacgaaagcgctgcccggcgctcatgcccattgccgtcgcgctttccagggcatcctgcggcacctgctgcaggccggtcaccaccccgcgcaccagcggcagcagcgcatagagagtgagagcgatcagggctggcgccacgccggtcccggagacgcccagctcgcccagcgtcgggaaataacgcgccagaccggcaagcggcgcaatcagcaggccaaaaagcgctaccgacggaatagtctggatcacattgagcgcggtgaaagccggcgcctgccagcgcggacgccgccacagccatacccccagcggcaggccaatcagcaggcccggcagcagggtgccgaacagcagaagcagatgctggcgcagggcgtcatcaaatacctcctgacggttggcatactccttcagcaaggagagctgatcgagcgccccgatagcgagcaggatgatgggcaacagccagacttgcgcattgagcagccagcgccagagcggccggacggtaagatgacggatggcctcgctggccagcaacagacaaagcgccagcgacagccacaggccgctgccgggcgaggtgcgcgccagcggcgagccgtgccgggagagctcaagcgccgcctggccgctgccccagataagcagcgggaagagcagttcggccagcagcaggtggagaaacggcatgatcctgcccggcagccagcaaagcagcatcccggcaagggccgccgccagctgaacgccggcgagccagggcagcacctgccacagcccgcgcccttccccggagagtaagcgattcggcgcataagtgacaaacggcagcgccagcgtaaccagcagcagacctgtcagcagcaagccgacgcgatgagtacagcgaatggtcaccggtggcttacttcagcaggcctttctgctgcagataatctgccgccacgcgcttcgcatcctggccctccaccgcaatgcgggcgttcagctgctgcagcgttttttcatcgaggctggcgaagaccggctgcagccagtcggcgatctgcgggtaggccttgagcaccgcctcgcgcaccaccggcgtcggggcatatatcggctgcacgccctgcgggtcgctcagcgtctgtaaccccagggccgccaccgggccatcggtgccgtaggccatcgccgcgttaacgccggaggtctgttgcgccgccgctttgatggtcaccgccgtatcgcccccggccagcgacagcagctggttctggttgaggttgaagccatacgctttttcaaacgccggcagcgcgtccgggcgctcaataaattccgccgaagccgccagcttaaattcgccgccctgcttcaggtagcgactgaggtcggccagcgaggtcagcttatttttctccgccaggtcctggcgcacggcgatagtccaggtgttgttggccggcgccggggtgagccataccagctgatgtttctcctgatcgaggcgcttcaccttctcatagccctgttgggcattcttccacgccgggtcgttttcatctttgaagaagaaggcgccattgccggtatattccgggtagatatccaactcgccggcgacaatcgccccgcgcaccaccggcgtggtgccgagctggattttattaatcgtttttacgccgtggctttccagcacctgctggatcatattgcccagcagcgcgccttcggtatcaattttcgagccgaccttcaccggctccgccgcctgcagcggtaaacttatcagggcggccagcgccagcgcgccggaccatgtcgttgccatcttcatcccgcttccctcagttcttttgcgcttcgcttacagaagcttaagagaaaagcgtagcccatttgccagcgatgcgaaaaagaaaaggccgattaatcggcctttaaagcgtgacgttggacttaagagcgatgccttacagcagctcaaactcgctctgcttcacgcgggctgagtccacgccgataaagacattgaatttgcccggctcagcaacgtatttcatctgctgattccagaacttcagcgcgtcgacgtcgattgggaagctaacggtttgcgtttcgcccggtttgagggtgacctttttaaagccgcgcagcattttcaccggccggctcatggaggcggtgacgtcctgcaggtagagctggatcaccgtcgccccttcgcgattgccggtgttggtcacctgcacgctggcggtcacgctgccatcgcgcggcatggtggccgacgacatgttgacatcggagacgctaaaggtggtgtagctcaggccgtaaccaaacggatacagcgggccattggcttcatcgaagtaacgcgaggtgtacttgttcggcttctccggattatacggccggccggtattcaggtggctgtagtaggttgggatctgccccaccgagcgcgggaaagacatcggcagcttgcccgacgggttgtagtcgccaaacagcacgtcggcgatggcgtggccgccttcggtgccagcaaaccaggtctccagcagcgcatcggcttgctgatcctctttcaccagcgccagcggacgcccgttcatcagcaccagcaccagcggtttgccggtggctttaagagcggcaatcagattgcgctggctctgcggcagggtgatatcggtccggctggaggcctcatgcgccatgccctgcgcctcgcccaccacggcgaccaccacatcggattgcttcgccgccgcgaccgcttcgtcgatcatttcctgcggcgagcgtgggtcaacctgcaccgcgttctcatacaaattgaggaaatcgacaatgcctttgtcatcggtaacgttcgcccctttggcgtaaatcactttgccgttatcgcccagcgcttctttgatgccggtcaggacggtcaccgactggtcggccaccccggccgcggaccagctgcccatcatgtcgcgcttgctgtccgccagcgcgccaaccaccgcgatagtgccggattttttcagcggcagcgtatcaagacggttcttcagcagcaccaggctctcgcgagccacttcgcgcgcctctttacgatgcagacgactttccgcattggtatcctgcgggtcagaatctttcggtcccaggtggctgtagggatcgttgaacagtcccatatcatatttcacgttgagcacgtgtcgggtggcatcatccagctcggccatggtcaccttgccggacttcaccagccccggcaggtacttgctgtaatactcgtcgctcatgctcatgttgatgccggacttcagcgctacgcgcaccgcgtcttccgggtcggaggccacgccgtgcttaatcaactctttgatggcgccgtggtcggaaacggtgatgcctttaaagccccactggtcgcgcaggacgtctttcagcagccaggaatcagaggtcgccggggtgccgttcagcgagttcagggctaccatcaccgcgccgctgccggcatcaagcccggctttatacggcggcatatagtcgttgaacaggcgctgcgggctcatgtcgaccgtattgtactctttcccgccctccaccgcgccgtaggcggcgaaatgcttgacgctggtcatcaccgaatagcggtccgccgggctcttgccctgcatcgactccaccatcgcctggcccatcatcgtggtcagataggtgtcttccccgaacccttcggaagcgcgtccccagcgcgggtcgcgggagacgtcgaccatcggcgcccaggtcatgttcaagccgtcatcggcggcttcataagctgacacgcggcccacggtcttcaccgtatcaaggttaaacgacgaggccaggccgaggcttatcggaaacacggtgcgctgaccgtgcagcacatcgtaggcaaagaacagcgggatcttcaggcggctaagctgcatcacctgatcctgcattacacggatatccgggcgggtaacggtgttaaaaatcgcccccacctgaccgttcttgatcatttcacggatcgcctctttcgggttatccgggccaacgcttatcagacgcagctggccgattttctcgtccaccgtcatttttttcagcaggtcggtgacaaaggcatcccgcgcctgcggggtcagggggtggttaccaaacagttcatccgccagcgcgggttgcagcgccagactcacggcgacgcctacagtgcagagccatttcattgttatctcgctttatctcagacggggactcggtaaaacataataaaaaccgcagtttgccatatatataaacaacgcgcccgcagaatgctaaggttcttctctgatttttgcgaaacattcatgcatcaaattgtcatacaaagcgctatgcttatcctcgatatttcgcgcaccaccacaaggagtggaacatgtcatctgcacccactgacacccataaaacgtttctggctgacctggcgcgcctggttggcccttcgcatctgctgaccgacccggcaaaaacccagcgctaccgcaagggcttccgctccggtcagggcgaggccctggcggttgtctttcccggtaccctgctggagctctggcgcgtgctcaacgcctgcgtagacgccgataaaataattctgatgcaggcggccaacaccggcctgaccgaaggttcgacccccaacggcaatgattacgatcgcgagatcgtgattatcagcaccctgcgcctggacaaactgcatctgctggacaaaggcgagcaggtgctggcctggcccggcaccaccctctattcgctggaaaaagcgctcaaaccgctgggacgcgaaccgcactcggtgatcggttcgtcatgcatcggcgcatcggtcatcggcgggatctgcaacaactccggcggctcgctggtgcagcgcgggccggcctacactgagatgtcgctgttcgcgcagattgacgccgacggcaagctgaagctggtcaatcatctgggtatcgatctcggcagcacgccggagcagatcctcagccgcctcgacgacgaacggattagcgatagcgatgtcctgcacgacggccgccacgcccacgatcacgactatgtcacccgcgtgcgcgatgtcgatgccgacaccccggcgcgctataacgccgacccggaccgcctgttcgaatcctccggctgcgccggcaagctggcggttttcgccgtgcgtctcgatactttcccggcggaaaagcgccagcaggtgttttacattggcaccaaccagccgcaggtattgaccgagatccgccgccatatcctcgccgagttccagcatctgccggtggcgggggaatatatgcaccgcgatatttacgatatcgccgagaagtatggcaaagacaccttcctgatgatcgacaagctcggcaccgacaaaatgccgttcttcttcaccatgaaggggcgcaccgacgcgatgctggagaaagtctcgctgtttaagccgcactttaccgaccgctttatgcagaagctcggccacgtcttcccggcgcatttaccggagcggatgaaaacctggcgtgataaatatgaacatcatctgctgctgaagatggctggcgacggcatcgaagaagcgcagcgttggttgacggagtacttccagcaggccgagggggatttcttcgcctgtacgccggaggaaggcagcaaggcgttcctccatcgctttgccgccgccggcgcggcgatccgctatcaggcggtgcatgccgacgaagtcgaagatattctggcgctggatatcgccctgcgccgtaacgataccgagtggttcgaacatctgccgccggagatcgacacccagctggtgcataagctctactatggccactttatgtgccatgtgttccatcaagattacatcgtcaggaaaggggtcgacgcacacgcgctgaaggaaaaaatgctggagttactgaaagcgcgcggcgcccagtatccggcggagcataacgtgggtcatctgtatgaggccccggagagcctgcagcagttctatcgccagaacgatcccaccaacagcatgaacccggggattggtaaaaccagcaagcagaaatactggggtgaagcggccccgacgccagcctctccggcggatccgcaataatcgacggcaggactattcagcctggcgcttctgtattacgctgcacgccggagaatgtttctccggcagattcaggagcgccgccatgcccgcagaggccccgttactcgacagtgatttagaaattcgcgaagcgctgcccgacgatgcgcacgccatcgccgcgctgtatgtctggcacgtacttaatggccgcgcctccttcgaagagatcccccccaccgttgacgaaatgcgtaaacggatccagaccgtgcgcgacaacgggctgccgtggctggtagcactgtggcgcggggctatcgtcggctactgctatgccaccttctatcgcccgcgtccggcctatcgctacaccctcgaggaatcgatatacgtggaatccggaatgggcggacgcggcatcggcagcgcgctgctgtccaggctaatcgctgagtgcgagaaaggcccgtggcggcagatgctggcgatcatcggcgatggccataacaatgccggctcgctggcgatccataaaaagttcggctttaccgtggcgggtcagctgcgcagcgtcggctacaagatgggcgactggcgggatacgttgattatgcagcgcgcgctgggtgacggcgactggacgctgccggagtgatatccggcgccaaatccccggctcgcggcgtaaacgccttagccgggctaccgttcagcgcggttccgtagaagcgtcagccgccatcctgcacaaacaccggcactcggcctgattgcccggcggcgctgctggactgaccccataaagttggatggttcatattaagcggctctcagagcctgggttcggtactctaccggactcaggccttttaatttcaggcttatccgctcgttgttgtagtaatggatatagtcctctacggcttttcttagcgcactgacactcctgaactccctcagataaaaacactccgatttcagggtcccgaagaagttttccatcactgcattatccaggcagtttcctttacgcgacatactctgcgtcatcccatgcgcctttaaacgttcctgatagctcctcatcctgtaatgccagccctgatccgagtgcagcagcggagcatctcccggtctgagcttcgggaacgcaccgtccagcatcgtattcaccatctccatcaccggcctttccgacaggctgtaggcgataacctcccggttaaacagatcgagaactgacgacaggtaaagcttttttccctgtaccgggaactctgtcacatctgttacccatttttcgttggcttttgacgcaccgaagttccggctcaggatattgggcgcggcctcgcccgttctccctttccaggcacgatattttttcgcccttatcacagaccggagtgacagttctgccatcagccgctgcactgttttatggtttatccgcagcccctgttttctcagtgcgagcgtgatcctgcggtagccataacgacctttgtgatagtggtatatcttcctgatgttctctttaagacccgcatacctgtccccttgcttcagtgcattcatattgtaataccacgtgctacgggacataccggccgcccgcagaaggtcccgcagagcgtgttcatgccttagttcactgattatcagggctttttgccatttttttcgctctgaaccaaggctttcaacttttttagataggcattctctgcccgcagataacgcagttcggccctgagctcttcgggggagagtttttccagctctttatctgtcagtggtgggatattttttggctttgtcatttgtccgggccgtccgcattgcatgtttaaaagaccttccgctccggcatcgttgtacacgtcgagccagcgccggacaagtatttctgcggagagattaaaccgggcagccgcttcacgcatcgtcaggcggtcactgataaccgcccggacgaccacgagtttaaattcatcggaataatgattattttttgcagtcaggccttctgcaccgtggaactgccatgccctgacccagcgacggacagatgttctttcaataccaaaaaggtcggctgtactctgttctccgtctttaccggacaaataatgattaaccacagccagttttgtttcaggggaatactttggtttagccataaaattgcaccttactcagttgggtgtccaacttttggggtgcagtccactgcgcttgccgggcctacgaaggggatgaacccggcgccaaatcatgtaggccggataaggcgcgagccgccatccaccacaaacaccggcactcgacctgattgcccggcggcgctgcgcttgccgggcctgcgaagggggcaaacccggtgccaaatcacgtagcccggataaggcgcaatgcgccgccatccgtgagacatgcagattaatcgttctgcgcggtctgcgcgccgcctttcagcatcgcctccgccatctgcgcttcgcgctgctttttatagctcagcgccgaggcgggtaccggcatcaccttcccggtttcaatccaggtccgcaagcggctggcgtcagcgaagtgggtatatttgccgaaggcatccatcaccaccagcgccaccggacgttggttaatcaccgtgcgcataatcaggcagtggccggcagcgttggtgaagccggttttggtcagctgaatgttccagttatcgcgatacaccagatggttggtgttgcggaacggcaggctgtaggccggatgggcgaaggtggcggtctcttctttggtggtgctcagctggccgatcagcggatactgctcgctggcgatcagcagtttggtcagatcgcgggcggtggagacgttatgcaccgacaggccggtgggctccacgtagcgggtatgggtcatgcccagcgcctgggctttggcgttcatcgcgcgaataaaagcgtcgtagccgcccggatagtgatgcgccaggctggcggccgcgcggttctcggaagacatcagcgccagcagcagcatatcgcggcgactaatctggctgttgaggcgcacgcgggagtagatccccttcatttccggcgtatggctgatatccaccgtcagcatctcatccagcggcagatgggcatcgagcaccaccatggcggtcatcactttggtgatcgacgccatcgggcgcaccagatccggctggctggcataaatgatttttttcgtggccagatcgacgatcatggcgctgccggaggcaatttccggctgcgaggcggtcaccgccgtcggggtttttgctaacgcctggggcgcaaaaggcacagccagcagcaaggtcaggctgagcaaagagactcgaaatttcggcatcatgggcattctgaaaagtatttttgcacgttatggaacgtacgccgcgaggttaagtgggcaacttcgctggcaaacgccatcataccgcgccgtaaggccctgtgcctaataagaatcgtgaagaaatgctgcattgccgacataaaatacatatttgccggcaatgcatatttacccgtgccgcccgatcagaagagtcggtagccatacccccagagcaccacggtgatggccagcagcacttccagcaccagtaccccaatagctagcgtcgagctggcaaagcttaacccctcttcccgattaatgctcaggaaggtcggaatgccgagatacagcagatacccggtatagaacagcgcaatagtaccgaccagcgcgcacagccagaccagcggatagagcgccacaatcccgctcagaaacagcggggtggcgacgtagccggcaaacaccatgcagcgtttcagggaaggctgctgcggatactgcctcgccatccaccagatgacccgccccatgatcgccaccccggcaagcatcacggcataaaacagcaccgccagcgccagtccggtcagcatcgacagtttaatcacggtgccatcgccgaagttccagcccagctgcgtggtgccgataaaggcgcagactaccggaaccgccgccatcagcagcacatgatgcgtatagtgatgagaaatggtttcattctcgctcttaatcacgctcatttcccggttgggatgagcgaagagcccccagacatggttcatagcgtcccccttgtcacggcttcgtactgcactgatccaagtataattcaccctgtagattattttatgtacagcacagaaaattctgcgtcgccgcgttttggtcagcagggtgtatgattaagaggtgatgaggtaaggagaaaagctttttatggatatcaatcacctgatttcccagtatggctacgcggcgctgatcgtcggcagcatggcggaaggtgagacaattaccctgctgggcggcgtcgcggcgcatcaggggctactgaaatttcccctggtggtgatcgccgtcgccctcggcgggatgattggcgatcagctgctctatctggtcggtcgccgcttcgggggacgcatcctgcgccgtttcgccagtcagaaagcgcggatccgtaaagcgcagcgtatgatccagcaccggccgtggctgtttgtcatcggcacccgctttatgtatggcttccgggtaatcggccccctgctgatcggcgccagccgcctgccgccgcgcattttcctgccgctgaatattgtcggagcgctggtgtgggccctgctgtttaccaccattggctatctcggcggcgaggtggttggcccgtggctgcaccatctggatgcccatctgaagcactggatctggctgatcctcgcggtggtggtggtggtggccgcccactggtggctcaggcggcgcgagagtaagaagaaagactaagcggcgcgcccgcgggcgcaccgtggttggcggttacttcaccgtctggtggtagccgccgccgagggccgaggtcagttgaatgctagcgtcaatccactggccgtgcaggcgcaatgcggtgatccgttcctgcagcgccgggagcttcgccatactgactctggagccaggtaagatccccgccgccattcgggcctgcgccagatccactacccgctgagcgtctttttcaacctgctgctgctgctggcttttggccattaatgtttcgacctggctggcggttttcgccacctggttaacggcatccaccaccgctttgttgtactgggcgatcgacaggctattctgcgcgctggcgatatccaggttagcgttaaggcggccgctgtcaaagatcggcagcgtcaacccggcagtaacgcccatctgctgcgccgaatggcggaaaagatcgcttaagtgcagggcatcctgctgcaggaacgccatcagattgatgtccggataaaacgccgctttcgccgcgtccacttcgctcagggacgcctcaatataccagtgggcgacctgcagatccgggcggcgcgccagcagctcatagccgagggtatctggcagctgcgcgctgaccgttggcaggctggcgggtttgaggtttagcgactggctctggctgttggtcagggccatcagccgcgcttcaatctctttcatcgtgcccgtcacgtccgccagctgctggtcggttttgctgacgttaatatcgttctccgccccttcggcggagttagtgatcccgcgctgatacagggccttgtcgaccgtcacgatattattttgctcgtttttcacctgctgcagcaccgctttgatcgccgcttccgtctgccactgccagtacagacgcgccacgctgccggagagcagctcacgggtctgggcctgttcagcaacctgggctttcagctcgccgatacgcgctttcaccagcgcacggtttttgccccacagatcgagatcccaaccggcggtcaggccaaaggtaccgttggtgtaccacgggccggtattgccgtcggtgtcggtagcaaacggtcccatcaggccttcggccgacatgcgctggcgttcaatatcggcggagaaatccatctccgggccaagattcgcctgcgacattcgcgcctgcgcttcggcaagcctgatgcgctgttcggcaatctgcatatccggcgcgttggccaacgctcgctgaatcagattattaagctgtgggtcatggtaatctttccaccagtcagtctgcggccagccatttttcacggcggcagggagatccatggaaacatgggaggctggaatttgctgctgcggcggattagcaacctcatgagatggcgcgcagccagccagcgcgatggccaggggcaatgccgccagcacgcttttatttaatatcaatttcattggacaggtcagataacttaatcaggttggttatcataagttaattgaattaaacgcgtttagtaaagcgtgtgactaaattattagtttgctaaaaataaacaaccttatcaattcaaggggtgaatatgagccggcatcttttaacgagccgcacctcttttccaccctgcccgctctggatgaagagaaagaacctccgatgacctttttactgcgcgcgcgtaaaccggctaatctcccgcccggcgatggccgggcgggcatcctttaggctttcaggctggcgccgcggctggcaatcacctctttataccagccaaagctcttcttcttactgcgcgccagggtgccggtaccgtcatcatggcggtcgacatagataaagccgtagcgcttcgacagctccgcctttgaggcgctcaccaggtcaatcggtccccagctggtaaagcccatcagctcaacgccatcgtcaatggcttcccgcgcctgcaccaggtggtcgttcaggtaactgatgcggtagtcatcgttaatgctgccgtcggcttccaccttatctttggcgcccagaccgttttccacaataaacagcggcttctggtagcgatcccacagcacgttcagcagcgtgcgcaggcccagcggatctatctgccagccccactccgagctcgccaggtgcgggttcggcaccatgctgagaatattgccgcgcgcctgctggttcagcgcctcgtcggcggtgacgcagccggtcatgtagtagctgaaggagataaagtcgacggtggtttttagcgcttcacgatcggcgtcggtgatggtgagcgtgatgccgttgtcacggaaatagcgctgcatatagcccgggtacgcgccgcgcgcctgtacgtcgccgaagaactgccagctgcggttctcctgcagcgtctcgaacacatcctccggtttgcagctcaggggatacatcagcccgccgagcagcatattgccgattttgccctcaggcaccagctcatgacaggctttgaccgccagcgcgctggccaccagctggtggtgaatcgcctgatacacctcgcctttgctgctgccggccggcaggccgacgccggtcatcggggcatgcagcgacatattgatttcgttaaaggtcagccacagtttgaccttatttttatagcggctgaacaccgtccgggcgtagcgctcaaagaagccaatcacctcccggctgccccagccgccgtagttttttaccagcgcccatggcatttcataatgcgacagcgtcaccagcggggtgatgctgtgcttcgccatctcgtcgaacagcttgtcgtagaacgcgaggccggcttcgttcggctcggcgtcgtcgccgttggggtagatgcgggtccaggcgatggagactcgcaggcagttaaagcccatctcggcaaacagggcaatatcttccggatagcgatggtaaaaatcgatcgccacatcttttatgccgctgtcgccgggtacgcgctcgaccacttcgccgaacacgccgtgcggctgcacatcggaggtggataagcctttgccatcttccagataagcaccttccacctgattggccgcggtcgcgccgccccataaaaaatccgtcgggaatgttttcatctttttctcctgtgattaatggctgactgacaacagcggctgaccggcttcgacggtgctggacgccaccgtatcaatctcccggtagtcgtcgctgttgctgataatgatcggggtcaccaggtcgtagccggcgtccagaatcgcctggcgatcaaactcaatcagcagatcgccggcctgtaccctgtcgccctctttcacatgcgcggtaaagggcacgccgtcgagtttgaccgtgtcgatgccgacgtggatcagcagctcaatgccgctgtcgctttgcaggccgatggcgtgtttagtctgaaacagggaggccacttcgcccgggaacggggcaatcacttggcccaccgccgggataatggcgacccctttacccagcaggccgctggcgaaggtgctatccggcacctgctcgagggcgataacgctgccgctcatcggcgccagaatatcgtttgccgaggccggggctaccgtcacggcgcccggtgcagcgctggcgcgcggcaggccggcgaagaaggtcagcacgcaggcgagcacgaaagccacgccggtgccgataagcccgccccagacgctggcgtcaatcccgccgggcgggatcatctgcgccgggaaaaagatattcggcacgccgaacgagtaagcatgactattactgaaggcggtgatcgccccgccgatggcgccggcgatacagccgaagataaacggacgacgcagcggcagggtcagaccatagatagccggctcggtgatgccaaacagccccgcagaaaaggcggaaccggccagcatccgctgacgcgcatcgcgggtggccagcaaaatccccagaaccgcccccacctgggcaatcaccgccggaagaataatcggcagcatggagtcgtgaccaagtaccgtcatgttgttgatcatcaacggcaccagcccccagtgcaggccgaaaataacgcacacctgccacatggcgcccagtaccgcgcccgccagccatggcgcaaacgcataaatgaactggtagccgttggccagcagatggctcagccaggtggcgaccgggccaatcaccaggaaggtgagcgggaccaccaccgccaggcagatggccgggctgaagaagtttttcattgatgacggcaacagcgcgttgctcttgcgctccagccagcaggagacccatgaggcgagaataatcgggatcactgacgagctgtagttgataaaggtcaccggaatgccgagaaagtgctccaccgccgcgcccggcgcctggctggcctcaaaggcctgaatcatcagcgggtgggttaacgccccgccaatcaccatcgagataaacgggttgccgccaaacttcttcccggcggtatagccaagaaacagcgggaagaaaaagaacagcgcgtcgctggcggcaaaccagattttataagtcccctgctccggcgtaagccagccgcaggtcaccgccagcgccagcaggcctttcagcagaccggttgccgccatcacgccgataaacggtgtaaaaatgccggagatgatgtcgataagctggcttaacaccgatcctttggccgctttttcctcggcaaccggttcgctgtcatcgcttaaccccgcctcctggcgcaccgccagccagacgtcgtgaacgtggttgccaatcaccacctgaaactggccgccgctctccaccaccataatcacgcccggattggccttcagcccttcggcatcggctttgccgttatccttcagtttaaaacgcagacgtgtcgcacagtgaaccagactcacaatgttctctttgccgccgacgcggttgagaatatcctgcgcgagtgctttatattccatgctcttttccttactgccgctgcccgcagacaaccggcgactgagtagtaaaaaataaaaaaacccgagaaccacgccggtgggcgtcgcgctcaggttttgcctgcatcatgcagtaacaatccagttttgttggggagaattaacgcccctcttttcttacccgttcgatatgaatggcaagaaacataatttcttcggtggtcagcgaccgttgatactgcttttgcagatgcgtcgccaccgtttccgcacacttccacgctttggcgtagttatctttcaccgcgctgtgcagcgagacgtcgtcatcttccaccaccgtgcgcgtcagcatccgctgggcgaaaaacttcaggtgggtgacgaaacgctgatagctcagcgactcttcatcgtagttaagctgcagctgatacttcaccagctgcaggatctcctgcatcacccgggtcacgtgcatgacctccggcatttcgctgttgagctgcgccgtcaccagatgcagggcgataaatccggcttcatcctccgccagcttcacgccgagccttttggcaatgatggcccttgcctcctggcccagcgcgaactccttcggatacagccgcttaatctcccacagcagcacgttacgcagtgcgatgccctttttctgccgctcgatagcaaaatgacagtgatccgttaacgtgatgtacaaactttcctgtaacttgcccagccgtccgcgtgccaggtcgataatgcgatcgcaggtggtcatcacttctaacggtatctgactgagaagctcgcctaagcggccgaccagctcatcgctttgtaaggcgaaaactttttcaattttactgtcgtccagcacgtcgcccgggcgtttctgaaaggccagccctcgccccatcaccacctgttcgcgccggtgctcgtcgagaaccaccaccacattgttattgagtactttggcgatttgcatatagaccccagaaacaaaaaaacctgacccccgacgaaacgccaggtgatcaggttttgcctgccgcagcagttgcaatccaacacccgcactgtaacaacttctgctgcgcgctcaacctgacaagtgaaaaaacgtgattaagatcgcgactatcagaaggtcacgacggttttccactccactacccacgcatcctgggtctgcgcgacgccgcccggacggtgccagtactgcaggcccggctgcagctccagccaggagaccgggcggaagcgataatagagctcaccgttcagcgaatgaccggccaccggctggtaagccggatcgttatagtcggtggcgccgcttatctgattcatatagcgctgattacgtgcgtagtggctgctcatgtcgatccacgtcaggccgaagccaatccagtcctccgggcgggcgtcaaacagaccgcggtagcgcatggaggcggcgacggcggagtggatatagttgctgcgctggtcgctgaggctgccgctcagtgagacgctcatcccccgcagcgggtcgtcggcgtggcgggtgatctgctggttcaggccggcgtacataaaccaggtgctatcgtgctcggcgtaaccttgcggatcggtcgccccggcgccgccggatttaccgctgtagaggtcgctctgcggcgcgttagtccagaccacgccaaggttataggctcccggcaggccattaatcagcggacgggtttcgatctccatcggcagtaagatgcctttgctacccttcgtcgaccagctccacgcgtggctgcgcgcggtagcctgcgggttttgctccatcactccgcctttcagggtgaccgtcggcgtcagcttgtactccagggtggtgccccaggtatgaatgttccagttattccaggtcagcgagttggccgatttcccaccgcactgggtcagcagctgaaaatcgcagggaatgatctggtcgaaggtttgcaccttgttcatcatgccgatgcgccaggtcaggcggcggtcgtcaaagctgcgggcaaaggtgagccagccaaggcgggtaatcgacccgccgccccagctctcctgcgatagatcgttgaaactcacccgcggatcctgcagccgtttcgtggtgagattatcatcgtggttgcggttgacgatattgccctcaagccgcgcgtccggtatgccggtccagcgctccagatcctgggtaaaggtcaatgacacctggtcaatataggccagatgtttatcatggttatagccgccgccggcgttgtaggccatctcgttaagatagccgagattataatgaaagccgttttcttcaaggatcggacgaatgcctagcatatcgcccagcagcccttgctgcccggcttcaaaccccagcgcgctgccgttccacgccgggatgtccgcggcgctcacggcaggcgccatggccgccagcatagcgccgatcaaaagctgatttatttttttgttatgcattgtgatatccaccgtgactgaataaaaacaaaggggatccccaggctatttatttacccgttttctttttttaaaaatgaatggcaaaaagcgtccgtcggtaataaaaccgcgacaatgccagagaaatcgttattcacatctcattgttttacatcatcattttatccaccctgaatttttaccaaaaaaaaacctaagcactttgcgccacgaatgacgaaagtgcttaggttttgcctgagttcagtagcaatcctgaattgattgaccgcacattatcactttattcaacccatgcctatcatcaataggcatgcaagtaataatatgtgaagcgaataacagtatggcggttaatagcggccgatcgccgccgctatttcagcagacgtttgcagggcgcgaatttcattaaacagggtcagcgcctcggtatattccttgcgtaaatagcctaaccactgcttaattctcgccacatgatacagaccggtatcaccctgcttttccaagcgggtatatttttgcaacagctggaccacctgcggccacggcatgcgcggttcattgtatttgatcacccggctgaggttcggcacattgagcgccccgcggccaatcatcaccgaatcgcagccggtgacagccatacaatcctgggcgctttgccagtcccagatttcaccgttggcgaccaccgggatagtcaggcgctggcggatctcgccgatcgcctgccagttgatacgttcggctttgtagccatcttctttggtacggccgtgaaccaccagttcgctggcccccgcctgctgcaccgcgtcggcgatttcaaagcgccgttcaccgctgtcccagccaagacgaactttcaccgtcaccggcagatgctcgggaaccgcctctcgcatggctttcgcgccgcgatagatcaactctggatctttcagcagcgttgccccgccgccgctgccgtttaccagcttcgacggacagccgcagtttaaatccaccccccatgaacccagcgccaccgcgcgggcggcattttccgccagccactcgggatattgtcccagcagctggacgcgtacgcgggtgccggacggcgtgcggctctggtgatgcagttccgggcatagcctgtagaacgattttaccggcagcagttgatccaccacgcgcagaaattcggtgatgcagagatcgtaatcgttaacctcggtcagcagctcgcgcaccagcgaatcgagcacgccttccatcggcgccagtagaacacgcatatcgttacccggaaaaaaaagaggcgctatggtagcgcctccgggcgctggttgaaagcgctcaatgcgtcggaccagacgcacgccgttccccgcacgctcgatgcggcaaagcggcgagataatctctatgctttacaggggtctgtggcgtcccattcgcctttatttgccgcgcctcatccagcaagatagcgtggtgagcgctcccgcctgagccgcaaggtgtcgggccctgacgggtgagactatggttcccgtaagctatcagcgctatgcatagaattcatgatgtgatcggtagcacattttagggattaattgtatgatgaatgcacttcatcaagggttattaccatgagtaaatcgctgactattatctggcagtacctgcgggctttcgtcctgatttacgcctgcctgtacgccggaatttttatcgccgggctgctgcctatcactatccccggcagcatcatcggcatgctgatcctcttcgtgctgctggcgctgcaaattatgccgccgcaatgggtcaaccccggctgcaatatcctgatccgctatatggcgctgctgttcgtgccgatcggcgttggggtgatgcagtactgggatctgctgcgcgcccagctggggcctgtcgttatctcctgcgccatcagtacgctggtggtgtttgtagtggtgagctggagctcccatttggtgcatggcgaacgtaaagtgattggccaaaaaggaaaagaagaatgatgcatgaaatctggtggtcgctaccgctaaccctgatcgtcttttttctcgcccgcaaactggcggcccgctttaagttcccgctgctcaacccgctgctggtggcgatggtggtgattattccatttcttctgctgaccgggatctcctatgagcgttattttgccggcagcaaagtcctgaacgatctgctgcagccggcggtagtggcccttgcgttcccgctgtatgaacagctgcaccagatccgcgcccgctggaaatctatcattaccatctgctttatcggcagctgcgtggcgatgatcaccggcaccaccgtcgctctgctgatgggcgccacgccgcaaatcgccgcctctattctgcctaagtcagtcactacgccgattgctatggcggttagcggcagcatcggcggcattccggccatcagcgccgtgtgcgtaatttttgtcggcatcctcggcgcggtatttgggcatacgttgcttaacctgatgcgcattcgcaccaaagcgtcgcgcggcctgtcaatgggcaccgcctcgcacgccctcggcaccgcccgctgcgccgagctggactatcaggaaggcgcgtttagctcactggcgctggtgctatgcgggatcatcacctcgttgatggcgccgttcttatttccgctgatcctcgcagtggtaggttaatagtgatttaaatcacattttttagtgcaacaaatcggagttgcataaagaatgagatattcatcacatatggaaccgctggccgcccgtacactggcttcccattacactgttatgaggcaacgctatgcactcacgttttcaagctgctttgacgactctggcagcagatctgcaggcggccatcgccccgatgctcgccgacccgcatttcccggcgctgctcgaagccgatcaggtggcgacgctgcagcatgcgacaggtctggacgaagacgcgctggcttttgcgctactgccgcttgccgctgcctgcgcgcgccccgacctttctcattttaacgtcggggctatcgcccgcggcgtcagcggccgctggtactttggcggcaatatggagtttctcggcgctaccatgcagcagaccgttcacgcggaacagagcgccatcagccacgcctggctgcgcggcgagacctccctgcgcgctatcacggtgaactacacgccgtgcggtcattgccgtcagtttatgaacgaactgaacagcgggctggcgctgcgcattcatctgccgggtcgcgaagcgcatgccctggagcactatctgccggacgcctttggcccgaaagacctggagatcaaaaccctgctgatggatgaacaggaccatggcttcccggtcagcggcgatgccctaacccaggcagctattcaggccgccaaccgctgccatgcgccctatagccactcgccttccggcgtggcgctggagctgaaagatggtaccattttcagcggtagctatgcggaaaacgcagcgttcaacccgacgctgccgccgctgcagggggcgctgaatctcctgagcctcaacggctatgattatcccgctatccagcgggcaatcctggcggagaaagccgacgcggcgctgatccagtgggatgccaccgtcgccaccctgaaggcgctgggctgccacaatattgagcgcgtcctgttaggttgatcagcctgagcagattgccggacggcgtcttcggcttatccggccgaccttttataccgttaggtgtcgggtggcgctacgcttacccgacctacggttcgcgccatggcgacctgaagatccctatgccgggtgtcggctcacgccttacccggcctgcattcggcgatctgtctatattgctgaaaatccccgcaatcaaacgcgggtttcttgcgcttacccggcgggtaaagtagcctgaagactccgttgtctattattgagccaagttcatgttaaagcgtgcgttctacagcctgttagtcctgctcggcctgctgctgttgaccgtgctgggccttgaccgctggatgagctggaaaaccgcgccctatatctatgatgaactgcaggacctgccctaccgtcaggtcggtgtggtgctgggcaccgccaaatattaccgcaccggcgtcatcaatcagtattaccgttaccgcatccagggtgcgctgaacgcctacaacagcggcaaggtcaactatctcctgctgagcggcgataatgctctgcaaagctacaatgaaccgatgaccatgcgtcgggacctgattaaaggcggcgtcgatcccgcggatatcgtactggactatgccggtttccgtaccctcgactcgatcgtccgtacccggaaagtgttcgacaccaacgacttcattatcatcacccagcgcttccactgcgaacgggcgctgtttatcgccctgcatatggggatccaggcccagtgctacgcggtgccgtcgccgaaggatatgtggagcgtgcggctgcgcgagttcggcgcccgctttggcgcgctggcggacctctatatcttcaaacgggaaccgcgctttctcggccctctcatcccgattccggcgcagcagcatgacgtgccggatgacgcccagtcctacccggccgtcaccccggagcagctgctggagctgcagaaagaaaagtagcctccatcaacgcattcgtttcagatataaaaaaacccgcgccaggcgcgggtttttgatgcgttcaatcttatttcttacgggcgtatttcagggagtccagcgccacggcgaagataataatcgcccccttaataatgtactgccagtaagggttgacgccgatataggtcaggccgtagttgatgacggtgaagataatcaccccggtcaccacgccaaacaccgtccctaccccgccgctgaacgatacgccgcccaccacacaggcggcgatggcgtccagttcgtacataaagccgaggttattggtcgccgagccgatacgaccggcttccagcaggccgccgaaggcgtagaacacgccggagagggcatagatcatcagcaggtttaacgctacgttaaccccggagaccttcgccgcttccgggttaccgccgatagcgaaaatgtttttgccaaagcgcgtcttgttccacaggatccagacaaagaagacggcaatcagcgcgtagaaggtaatgtaggacaggcggaaggagcccagcgccacaaacccctgcgcgaaatgggagaagtggctgtcgaagccggagatcggcgacgcgcccacgaagtcgtagtacagcgagttaatgccgtacacgatgatcatggtgccgagagtggtaataaacggcgtcacgttcaggtaggcaatgacgatcccgttaatcaggccgatgaccgccccgatggcgcacaccagcaggatcaccagcgggatcggcatggtcgccatatccgggaataccttattggcattatccaccgcctgcagcatggtggcggcaatcaccgccgccagacccacctgacggccggcggagaggtcggtcccctgcgtgacgataagtccggccacgccgagggcaataataatacgcaccgaggactgggtcagaatattactcaggttgagcagacttaaaaatgtcggatcctggaaaataataatggccagcaggaccagaaggacaacatatatcccaccctctttcaggtaagtgagaaaactctttttatttaacgcactcatgtgaagcccctgatcttaaaggtgcaatgacgcaagacgcagtatttcgttttgcgtagtggttttagtctcaacaatgcccgcgaccaggccgttgctcatcaccagaatgcggtcggtaatccccagcagttccggcatttcggaagaaataataatgatccctttgtcttttttagccagttcggcaatcagctgatagatttcaaacttggcgccgacgtcgataccgcgcgttggctcatccagcatcaggatctccggctgggtcagcagccagcggcctataatgaccttttgctggttaccaccggaaagcgagccaatctgcgtatgctgaccgggggttttgacgcgcatcgagtcaataacccattgggtatcgctcttcattcgcgagttatccagcaagccgatgctgtttttatatttcttaatattggagatcagcgagttaaacccgatatccagataggcgtaaatccctgtagagcgccgctcctcggtcaccagcgcaaaaccgtggtttatcgcctcgttggcgctgtggttgttgatcttctttccgtgcagcgtgatggtgccgctggccttctcacggatgccgaacagggtctccacgatgtcggtgcgtttagcgcccaccaggccggcgataccgagaatttcgcccttatgcaggtcaaaggagacatcgcgaatggagggctggcgcagcgaggtgagattgcgcacctggaggatcacttcgcccggagtgttttcgcgatccggaaaacgctggttaagcgaacgcccgaccatcatggcgatgatcttatccatatccagcccttccagcggctgggtggcgatccactggccgtcgcgcaggatggttatttcatcgcacaactggaaaatttcttccattttatgcgagatatagacgataccgcagccgcgatctttcagcttacggatgatcttaaacagatggttgacctctttttccgtcagcgatgacgtcggctcatccatgatgacgattttggcgtcataggaaaacgccttcgcgatctcaatcatctgcatctgagataccgataaggtaccgacgcgggcgcgcggatcgatatcaatatccagctcatcaaaaatggccttggtatcccggtacattttgtcctgatcgacaaacatgcctttagttggatagcgcccgagccacatgttatccatgaccgaacgctgtaataccaggtttaattcctgatgcaccatcgaaataccgttttccagggcttctttcgtcgaatggaaatcgatctcttttccctgaaaaagaatgctaccggaatctttttgatagatcccaaaaaggcattttaataatgtcgatttaccggcgccgttctcacccattaacgcatgaatggagtgcggacgaaccttcaggttgacattatcaagagccttgacgccaggaaacgatttgttgatgttgctcatctccaacaaatattcgcctgaccgttcgctattattgctgaccatagttatacctggctgcgttcatgcaagccccgtccggcgcactagcgccagcaggagtctggttctgtatcaggaataatcgggcgtggataacccacgcccgcaactcacatcacgattatttgccggtaaactggctcaggttgtctttatcgacgcccacgtaggggacgcgaacaatcttgttgtcaattttccagttggtgcctgccgcggcgtctttcccgtcggcaaggtttttcgccagctcgaaggtcgcttttgcctggttgttggcatcgttcagcacagtaccggccatcgcgccggatttcaccagcgccagggcttccggcagggcatcaacgccgaacaccggaatgctgctcttgttgtgcgctttcagcgcttcaaccgcgcccatcgccatggcgtcgttgttagcgatcaccacttcaatcttgttggcattcgggccggagagccaggcgtccattttgtctttcgcctgggcggtatcccacatcgcggtatccagctgcagctgctgggtcttcagacctttatcattcagctctttaataacgtaagtggtacgcgcttccgcatccggatggcccggctcgcctttcagcaggacgtactggatctgaccgtctttatttagatcccagttcgggttggctttccagtgcttggcgatcagatcgccctgaataatcccggactctttcgagtcggtaccgacgtaataagccttgtcataactatccagcgctttgcgggaaggctctttgttgaagaacaccaccggaatattctgcccgcgcgccttttcaatcaccgtacctgcggcggccgggtcaaccaggttaatcgccagcgccttcacgcctttcgccagaagcacgtcaatctgatcgttttgtttcgactggtcgttctgcgaatcattcatcaacagctggacgtctggcgcggatttgccatctttttcaatcgccttacgcactaccgacataaagttgtcgtcatatttataaatcgtcacgccgatacgggtatctgctgcgtgtgcggcggcgccaaataacagaccagccattacagcagacagggtaaacaccttcttattcatggaatctccggttttattatgcagggtcattattgtgagaaaatgcaggcgggatttgttgcattagtgttaccgcacaacgcatttcacgacgaaaattcggtcttccgtgtcgggtaacgctccagaaaaatacgactgtaaaactcgtttaacgccttgttcctactaaataaagtgaggaatatccatcacctcgtggttcagactggtaaacgctgccatcataatcaggcgaatgttaatatactgtgaatttactcacaaattgaaagcggttacatcccgcgatcgcgtcagttagtgatcggccccacagtttgccgctgggcaacggaatgacggcgcaccagcgtcggcataaagcagtgcgtcgcctcgcgatccagcttgccggccgcccccagcagcgccagctcggtggccagctttgccatcgacattaccggatagcgcacggtggtgagctgaggatcggtgtaacgggaaataggaatatcatcaaagccaatcagcgacagatgctgcggcacgacaatgccgttgtccttcagcgtcgtcagcgcgccggccgccatgctgtcgttataggcaaacaccgcggtgaggccgagattgcgccccagcagttcgaccatcgccgcttcaccgccctgcatatccggggagccggaaccgatccagctgtccggggcgatgatgccttgctcctgcagcgctttgctccacccttcccggcgcatatcgtcatcttcaatgccgtggtttgaggagagatagccgatgcgctggtgaccatgattgagcagcatacgggtggccatcagcgcgccgctgacgttgtcgagcccgacgcagcgatgggcataccccggcacgatgcggttgatcagcaccatccccgggatatgttgcataaagtcgctcagttcatcatcgctcagcgctttcgaatggacgatcagcgccgagcagcgctgacggatcagcacctcgatggcgtgacgctctttttccgcctcgtgatagctgttgccgatcagcacatatttctgatgctgctgagcaacggtatccactgctttcaccagcgcgccgaagaaggcatcggagacgtccatcaccaccacgccgatggtatcgctgacctgggtggccagcgcctgggcgttggcgttgggccggtagcccagttgggtcaccgctttcatcaccacgtcgcgcgtatccggactcaccagcgcgctgttattcagcacccgcgacacggtggccacggaaacgcccgcctggcgggcgacatcacgaatggtgatcatactcagcaaccttaagagaattacagcacgtcacattcacctcctgtgcttagcaaggaggctattctggcagcgacccgcggtccgctgcgtgagtgaggtcacacggctggaaacgtttacatccgttttgttaatgattgtgatcgagatcgttatctggatgtgtctttcaatgatgtgcctgacgcacgcagggttaactgacgccacagccattccaccggcccctggcggaagcggcgcagccagagcgatgagacaaggaggttaacggcccagatgggggggacaaaggccagcagctgcagacgatcgaagcgcataaacagcccaagatgataaaacagggtggtgcagatcagggtctgcagcaggtagttggtcagcgccatgcgtccgacgcaggcgatagcgcccaccaggcggaaacggcagagttgcggccagtagccccaggccagcgcggcatagccgatagcctgcagcggggcgctaagttcgcgcggcgcctgcagtaaaaacgcgcaccagcgatagtcccaggccagataccactgggcgaatattgccggcagattgaccgccatgccggccgccaccagcagcgcgccggtacgccggtagtgacgcaggctaaactgccccttcagccagccgctgcgcatcagcgccgcgcccatcagcatcatccccgccagctgccagccatactgcgcgcccagcgccagcagattgtcagatagcatatccgcccggttgctgaccgcctccatgccaccgtgcagcttccagtactgctcatactgcaggttcgccgcgtccggcgcccacgagcgattcgccgcggtcccggagatcatccccaacaggaccagcaccgcaatgccggtgaggtagagcaccaccccggtgttgaacagcgatttgacatggtgcgcctcacgcaccatgcgccagctcaccagccccaccagggcataggccagcagaatatcgccatcccagaaaaaaagaccgtgaatgaaaccgagcagcgccagcagcgtcagccgcgactggatccagcgcttccctcgcggaagcaatagctgaagaccggcgccaaacagcagcgcgaacagggtgagaaacttcacctgcgccagcaggtcgaggagcgcccaggtccaggcatcgctaagggacgcgcttcctgaccaggcgggattgagataagcggccttcggcaagccgaaggcgctgatattgagaagcaggataccgaggatggcgacgccgcggacaaagtccagcgtgacatttctctccatgcaccctgctccgttttagtcgtggtgacgtactgcgcgcaggaattcctggcgggtattctggctggatttaaacaggccgccgagagaggtggtggtggtggcgctggtcgcgtcgcgaatgccgcgcgccttcacgcaataatgcaccgcgtcaatggataccgccacgttgttggtgccgagcagcgtctgcagcgcgatcaggatctgctgcgtcagacgctcctggacctgcggacgttgggcgaagaactgcacaatgcggttgattttcgacaggccgatcaccgaatctttcgggatataggctaccgtcgctttaccatcgatggtaacgaaatggtgttcgcaggtgctggtcagggtgatatcgcgcacggtgaccatttcatcgaccttcattttgttttcaatgacggtgattttcgggaagcgagaataatccagcccggagaagatctcatcgacatacattttggcgatgcgatgcggggtctccatcagactgtcatcactcagatccagattcagcagttgcataatctcggtcatatgaccggtaatcaaacgcttgcgtgtttcgttatcaatttcttgtactggcgcacgcatcggcgtctccagcccacgagcgaccagcgcttcatgaacgaggacggcttctttactcagtgatgacatttatgtttctcctgcaggtgtggcgctctttgctttttctgggggcaaagtttgtattcattgtgcgtgaggtggcgcacagaatccagtagccgtaacgataattattgaaattggcgctgccttttattagggagcgaagccatgcctcaggcgcaacgccaaatccttatcgccgtatccggaatgttccaaccgctgtacgcattcataagcgccgtcgctacaccggcatgttggctataagttgcattaatgatgcagtaagttctcaaaaggagaaagtgaaagttgctcaccggctaatgaaatatctgtattatgaacgtttacgcgcacatcccttccgaggagccttgcatggaactgcttgaagagcatcgctgttttgacggccagcaacaacgctggcgtcatcactcccctgtcctgaactgcgccatgacgttcagcatttttttaccgcctgagcgcgaaacgccgccgccggtgctgtactggctgtcggggctgacctgtaacgatgagaactttaccaccaaggcgggcgcccagcgcattgccgccgagctgggcatcgcgctggtgatgccggataccagcccgcgcggtgacgaggcggccaacgacgacggttacgatctcggacaaggcgccggcttctacctgaacgccaccgaggcgccctgggcggcgcactaccgaatgtacgattacctgcgtgacgaactgcccgcgcttattcgtagcgagtttagcgtcggcgaacgctacgccgtcagcggccactcgatgggcggccacggcgcgctcattatggcgctcaaaaatcccggccgctacgccagcgtctccgccttcgcgccgatcgtcaatccctcccaggtcccgtggggcaagaaagcgtttaccgcctatctcggcgcggatgaatcggcatggcactcctgggacagctgcgcgctgatgcaggccagccggccggaggacgccgtgccgacgcttatcgatcagggcgacaacgatcctttccttgccggacagctgcagccggcggtactggcggaggtcgcgcggcagaaggcctggccgttaacgctgcgcatccagcccggttacgaccacagctattactttattgcctcgtttattgaagaccatctgcgcttccatgcgcagcatctctttggctaaacgccaatgcgccgcgaagctgcttcgcggcgcatgttcaggcctacaggacgcgttttagcgccggcaatcagaagcgataatccaccgccataaagtagcgacggccttcttcggtatagctgtagtcgtcccggctcagatctttatcacccacgttctgcaccccggagcgcagtttcacgtttttggtcacctgccatgccgcgccaacgtcaaacagggtgtagccgcccggcgttttgccggtggcgctcaccgcgcgctgctggccggtatagttggccgtcacgtagaaggaccaatcgtccagcggtttccagtcgagcgtgccgttggcggtatggaacggcagcgtctgcagcggtttgtcgccgccattgctcagatcgcgaccatcgttgtatgtgtagttcaccgtcagcttccactcatcgccaaacgggatcttcacctccgtctccacccctttgatgcgggctttgttgacgttgaaatagcggaagatcggcacgcgcttgccgttgacggttttccagccgacaaagttcgggtagcccggcgcttcgctggcgctggaggtgcgcagaacgtcgatcatgtcgtcgacattattctggaaggtggtgatgctgccttcgacattttcaagccagccctcttccccgcggtagtagagaccgagctcgaagctttcgctggtttccggtttcagatccgggttaccgacgatgctgcacgagccgcgacaggagttggtggtccagtcggggttaagctgcagcagcgacggggctttaaacgccgtcgcccagccgcctttgacggtgacggtatcggtggcgttatacaccagataggcgcgcgggctccagtgatcgccataggtctgatggtcgtccatccgaatgccggtggtcagcgccagcggctcgatgatgcgccattcgtcttcgataaacagggcgtactggctggccgacgttgactggccgccgctgctcaggttgaccggatctttcagtttgtcgtggcgccattcgccgccgaaggtcaccagctggttaatcatgtccagcggcaggacatacttgccgtcgatggcattgctttccgaggtaatagtcccgctctgccctggatttttgttatccaccttttcgccgtagaacttgagctcgctattgccgatatcccagcggccgttatggctcagagagtagttctcccgctcaaggcggttgcggtcaagggaatcggaatcgcgatcctgacggtcaaagccgtagcctgcggtaaaatcgtggttttcgttcggcgtccaggcgaattcaacattgccatcgcggctggtgaagccctcgatgcgcggcgtctcgccggtggcattactggatgactgcggatcgtccttggcgcgttttgccaggctgccgtaggccttcattccaagtacgccgtcgatcagcgggccgctggtgaagaactggccgttataggtatccccgcgatcgcggtgctcctgaatagtggtatcagcactcagcgtcccggtccatttctggccgatttttttggtaataatgttgaccaccccaccgagcgcatcggagccgtaaagggaggacatcgggccgcgcaccacttcgatacgctcaatagcatccaccgggatccagttaaggtcgaagtcattgtggcggaagacggcgttccgcgagttaacgcgcttgccgtcgaccaggatcagggtatagctgctgctcagaccgcggatgctaacgcccttgcggttatccccttcgttggtgagctggaccccaggcacatcgcgcagcacgtctttcaggttctgaacaggcttgcgttgtaaatcctgttgggtgatgacgctgatgctcgccggcgcgtctttgacattctgttcagtggccgaggcggtcaccaccagcgtttcttcattcacatcggccagagccggaaacgccaacgatacgacggacgcagacaatcccgcccggataaaagggtttaacctgaacattccaaatctccatgaggtgtacaaccaaacaaacaacaaggtgctgctcacacgcgctggcgacttgccgctctgtcggcggcatgctcgcgctgttttctcgtcgatgtggctggtcgcccggtgtcagtctgtacaagcggcagagacggggagtggcttcatccgtaatgggcgaaaatgataaagataatgattacgattatcaatataattatgaagaattgtgacaagctgtaaccgcacaaacataaaaaaagccctctgttcagagggcttgcgggtgatgacaaatctgtcttcgttattgtgctcacatgtctgccgggtggcggcttccgccttaccaggcctacgaaacatcgcaatatcaatcagttacgcggttatctgtaggcccgcgcaagcgcagcgccgccgggcaatccctgaagattgcactttgccagcaatataaagccctcttcacagagggcttttatcgcacaatcgcgaagattaacgcttaaagcggtccgggaaggtcatttcgctgtagcgaacaaagcgggtgcctttcgccagcttgtaaccaaaccagatgacgaggaacagcggaataccaatgtaggtcgccgccacgccgccccagtcaatagtgtccttgaggaacgcttcgtagttctgtccgagggtgatgatcaggcacagcacgaaggcgaagatcggccccagcgggaagaacccggaacgatacggcagattattaatatcgttaccctgcaggacgtagccgcgacggaaacgatagtggctgatcgcaatacccagccaggcgataaagcccgtcatcccggaggtgttcagcagccacaggtacaccgtctggttgccaaacatggaagtcaggaagcacagcgccgcgatcacggtggtcgcgtacagcgcgttacgcggcacgccgccacgcgacagcttcgagaaaatacgcggcgctttaccgtcgcaggccagggtgtacagcatacgcgtggaggcgtacatcccggagttacccgccgacagcacggcagtcaggataacggcgttcatgattgccgccgccgacagcaaaccagcatgctggaacaccagggtgaacgggctgacggagatatccttcacatcgttgcgcagcagactcggatcggtatacggaatgatcaggctgataatcaggatcgcgaagacgtaaaacagcaggatacgccagaagacctggcgcaccgcgcgcggaatgttcttctccggattttcagattcaccggcagcgatgccgataagctcggtgccctggaacgagaagccgacaatcatcgccacgccaatcatcgccgagaaaccgccggcgaacggcgcatccgcgatcccccagttgctccagccggctggctgcgcccctttgaagatgccgacaatcatcatcacgccgacgatgataaagataatgacggtggccacttttatcagcgagaaccagtattccgcctcgccaaagccgcgcaccgagatccagttcagcaggaacatgatgccgaggaataaggcgctccagatccagcccggagtgtcggggaaccagtagctcatcaccagctgtgaggccacgaggtcaacggcgatcgtcaccgcccagttgtaccagtagttccagcccagcgcgaagccgaagccttcttcaacataattctgcccgtaggtggcgaaggaaccggataccggcataaacgccgccagctcgccgaggctggtcatcaggaaatagaccatcaaaccgatcagaatataagacagcagcgccccgccgggacctgcttgcgaaatggttgcgccagaggcaacaaaaagacccgtaccgatggaaccgccgatggcgatcatggtcaagtggcgcgccttcagttcacgacgtagcgtgggcgcttctgtggttttagtttccgaaaccatgtgataatgctatccatccaaaaaatgaggcgcgattgtagcagacgatcggggttccatccggtacaaatgcaaagttataagagagcttcatgatcgcccgcaaattattagtaaagcactaacctgcggaattgccagcgaattccccccgtaatcaggcgataaaaccgggctgctacacctggcaatagtgcagaaaacgttgtaatgctttagaaatatgcttctgccggtgatggatccgccacagcgtgcgcgtcagccggggcaatggcactttcagttccgccagcgtgcccgaggcaagctgttcggcaatcacccgccgcgatagacagctgatgcccaggccatgcctgaccgcgtgcttgatcgcctctgaattacccagctccatgcccagatgaaacgccggcagatgcgacagcagaacgtaatcgacaatctcccgggtgccggagccatgctcgcgcaggatccacggcgcctcggccagttgctgcagggtcacctcccccgccagcagcggtgagttgggcgcggcaaacaccaccagctcatcctccagccacggctcggcaataatatcggcggcatggcacggcccctcaatcaggccgaaatccacccgcaggtcggcgacggcgttgatgacgtccaggctgttgccgacgctcagctcgaccggcagatccgggaagtcatgacgatagcgggcaataatctccggcataatatagttgccgatggtgctgctggcgtagactcggatcgccccgttatcgccgcgaaacagctgctcgatctccagggcccgctccagcagcgccagcgcacgcgggtacagcagccgtccatgctcattcaccaccagtcgtttaccgacgcggtcaaacagctgcacgccgagctgcccttccagatcggtcagcgcggcgctgaccgcggattgcgaaagcgccagcatctgtgacgcctgagtggtcgacccactcttgtggacttcggcgaacacttccagctgccgcagcgtaatatgcataacccacccgtttagtaatccaacctgaataaccttccttactatggtgacacaaatcgaggcggctgacggaaggaaaatccgcttatatcacaaaatcatcgtcttgccggcgagaccgccccgcttctgcctaacccgctctcgccccgttgtaaccggcgaagcggccattaaccacttattacgattgattataaacatataatcaattttatatttaatcccgcgcggcgtaacctttaggcagacaaaggagaaggttatgacagcactcactttacccaccaaacatcgttccctgtggcattttgtcccaggcctggcgctgaccgccgctctgaccggcgccgcctgtggccggtagtttcccggccatcgccggcgcaggctttagcgccctgaccctcgctatcctgttcgggatggtcgtcggcaacacggtctacccgaaaatctggcagccctgcgacggcggggtgatcttcgccaagcagcatctgctgcgcctggggatcatcctctacggctttcgcctgacgttcgcccagattgccgacgtcggcgtgagcggtattttgattgacgttctgacgctctccagtacctttttcatcgcctgcttccttggccagaaagtgtttggtctcgataaacacaccagctggctgatcggcgccggcagcagcatctgcggcgcggcggccgtgctcgccaccgagccggtggtcaaagccgaagccagtaaagtgacggttgccgtcgctacagtggttatcttcggtaccatcgccatcttcctctacccggcgatgtacccgctgctggcgcactggtttaccccggagacctacgggatctatatgggctccaccatgcatgaagtggcgcaggttgttgccgccggccatgcggtcagcccggacgcggagaacgcggcggttatcgccaaaatgctgcgcgtcatgatgctggctccgttcctgctgttcctggcggcgcgtgttaaacagctgaccccggcaggcaacggcgagaaaagcaaaatcaccattccgtggttcgccattatgttcatcctggtggcggtgtttaactccttccatctgctgccgaaagccgtggtggatatgctggtgacgctggataccgtcctgctggcgatggcaatggccgccctcggggtcaccacccacgtcagcgcgctgaaaaaagccggggcgaaaccgctgctgatggcgctgatgctgttcgtctggttgattgtcggcggcggggtcattaacgtcgctatccacagcctgatggcataaagcactacatctttctccagttaagccgctatcattacccaccccccagcggctttaactggagttttttttatgaaatacgtaggagcgcacgtgagcgcctcaggtggactggccaatgccgccattcgcgccgccgaaatcgaagcaaccgccttcgccctcttcaccaagaaccagcgccagtggcgcgccgcgccgctcagcgacgagaccatcgccgaattcaaagccgcctgtgaaaagtatcactttggcccggggcagatcctgccgcacgacagctacctgattaaccttggccacccggtggaagaagcgctggaaaaatcccgtgatgccttcattgatgaaatgacccgctgccagcagctgggactgacgctgctcaacttccaccccggcagccatctgcagcagatcccggaggaggagtgcctggcgcgcatcgccgaatcgatcaatatcgcgctggcgaagaccgaaggcgttactgcggtgatcgaaaacaccgctggccagggcagcaacctcggctttaagttcgagcacctcgcggccatcatcgacggtgtggaagataaatcccgcgtcggcgtctgcatcgatacctgccatgctttcgccgccggctacgacctgcgcagcgccgaagcctgcgaaaaaaccttcgccgccttcgaacgcatcgtcggttttcagtatctgcgcggcatgcatctcaacgatgccaagagcgccttcggcagccgggtcgaccgtcaccacagcctgggggaaggcaacatcggccacgattgcttcagctggatcatgcaggacagccgcttcgacggtattccgctgattctggaaaccatcaacccggatatctgggcggaagagattgcctggctgcgggcgcagcagattgccgaagtggcgtaaatagagacaaaaaagggccgaacagtcggcccttttttattgcggtaggattatgccgctttttcaacttccgctgtttgcgcctcagggcgtttcagcacggcgtaggcaaggcccgccaccagcgttccggcaacaatcgccagcaggtagcccagcaccggcgtaatcgcccccgggatcagcagaacaaacagcccgccgtgcggcgccatcagtttcgcgccgaccgccatggagatagcgccggttaccgcgccgccgacgatgcagcacggcagaacgcgcatcgggtcacgggcggcaaaaggaatcgccccttccgagataaagcacaggccaagaaccagcgcggctttacccccttcccgctgccctttgtcgaacttattgcgcgctaccagcgtcgcgatacccatcgccagcggtggcaccataccggccgccatgatcgccgccatcggcgcataggtctgggtactcagcaggccaacgccaaaggcataggccgctttgtttaccggcccgcccatgtcggtacacatcatcgcgccgaggatcgcgcccagcagaaccgcgttggcggtgcccatggtttgcagccagtgggtcagccaggcgaggataccggctaccggtttaccgatcagatagatcattgccaaacccacgatcagactggagaccagcggaatgatcaggattggcttcagggcttccatactctgcggcagtttcagcttcgtgctgatggctttcgccacataaccggcaaggaaaccagcgatgatcccgccgataaagccggagccgccgctaaccgccagcataccgccgataaggcccggggtcagacccggacggtcggcaatggagaaggcgataaagcctgccagtaccggcaccatcagcgcgaaggccgagccgccgccgatctgcatcagcgccgccgccagggtgtctttcacttcaaacgctttgatcccgaaggcaaaggagagcgcgatacacaggcccccggccactaccatcggcagcatataggagacgccggtcagcaggtggcgataggcgcccgccgactcttttttcccttcagcagccgcctgaggtttgccggatggctggtacggtttggcttccgccaccgctttatccagctcctgggcggttttcttcagcgccagaccggtggtggtgcggtacatcggcttgccggcgaatttcgccaggtccacctcgatatcggcagcgacgagcaccagatccgcctcggccacctcttccggggtgatggcattgcccgccccaacggagccgcgggtctccaccttcacccaccagccgcgttttttggcttcggtttcgatggcttctgccgccataaaggtgtgggcgacgccggtcggacaggcggtgaccgcgacaatgcgtttctgcccctgagcggcggccggaacggctaccgccgctggcgcaacgtagggcttagcgtggtctttcgcttctcccaggaacagctccggatgggcgacagcacggttaatatcgcccaggtaaacgtttttaccattcagcgcgctatcggccggcagcgcggttcccagcacgatggccagttcggcgtcattcgggttatcaatcagctcaaggtgcgctttcggcgccgcggcacccagcagggttttcgccatgtaggcgcgcgcctgtccgagtccggcatcaataatcagcagcgttttcattatgcctctcctgctgtcaattaaagggttgtaagtcgacgcgcgccatcatcgcggccaactgggtacggtcggtaattcctacattgctctggctgacggccagggcagcgacggcggtcgccaggcgcagggtatgctcgctggattcacgcatcagcaggccgtaaatcaggccgccgaccatcgaatcgccggcgccaacggtactgactacttccactgaaggtggtttagcaatccactccccagaggcgttgacccacagcgcgccctcttcgcccagggagatcaccacgtgggcgataccctgctcgcgcagcgcatgggcggcgtcgataacatctttcatctccggcagcttgcggccagcccagatttccagttcgcgacggttcggtttcaccagccacggcgccgcttttagtccggcaaccaacgcttcgcggctgctgtcgaaaatgatgcatgggcactgactgcgcagacgggtcatccagtcggtgaaggcttccgggctaacgccggacggcaggctgccgctgacgcagaccatatcgaactgcccgagccagctcagggagtcgttgacgaagcgttcccagtcgcccggggtgacttcaaagccggagaagttgaaatcggtcacttcgccatctttttccgtcagcttaacgttgatacgggtccggccctgcaccacctggaaacggttggcgatccccagctcgctgaacagctgctgaaagccgtcctggttgtctttacccaggaaaccgccgacggtgacgtcaatgccgagatctttcagcactttcgccacattaatgcctttcccggcggcgtgcaggccggtggtgcgcaccaggttcacttcgccgcgttcaatctccggggtgaatcccaccaggtcgtatgccgggtttaacgtaatcgttgctacacgtctgctcatttatgcgccctccccaaggcctgcggcgatcgcttcgccaatcgcatccagcgcttgttgcgcatcctcaccctgcgcggtaaaacgcagacggtgaccttttttcacacccagcgccacaaccttcatcaggctgcgaccgttagccggcttgccggaaccgtcgagattggtgacggtgatgtcgctggaaaattgtttaatggtgttgaccagcatggtgcccggacgggcatgcaggccgtgttcattgcgcaccacgaattcggcgctcagcacatcttcggcaatggcgtcgtcgctggtcagcagcgccagcacggtggcggcgtcggctttcagcaaatgttcagctttcttgtccagcagcagcttgctcagacggttcagcactgcggtcggctgctcgtcggccatcgccaccgtgaccagcagggaaaccggctgctcgtcgcgggtaaaggcgttagccgcgcggctgaccgccacggcgctgcgcaaattgccttccgcactgtcgttcagccagacgccctgaccgaggttcagcggcgtatcgttaatgacgtggctaacgaaggcggcatcgacagcgccaacttctttcagacgcgccgcgttcagcgcctgcagggtcagcagatcgctggccgcgacgtcgagactgagggtctcgttatccagcttcagcgcttcgctctgcttctctcccatcagcagcgcgcgcagctcttccgcggtagtggcggactgcagctgcgcggcgaccgcgtcatcgctcagcacatgggtcagctgacgcagcaggccgaggtgttcatctgagctggcggcaatcccgatcgccacataggcggtctgcccttcgccccaggtgacgccctgcgggaactgaaacacctgaacgccggtcttcagcacctggtcacgcgtatccgtcgtgccgtgcgggatcgcgatcccgttgccgaggaaggtcgaggtctgctgctcgcgcgccagcatgccgttcacgtagccatcggccacgttgccggcgctgaccagcgcggcggcgacctgccggatggcctcttctttattaccggcctgctggccgggatgaatatcctgcacagataactggaacatggttctcctctcctgctgaattgaatcgtttcagctaacttgagaaaaaaggcgccatctgacggggaacggattgccgaatgacgctgaaacgtttcaagaattttgtacctttcttgctcaacgcgcaaggtacgtcagcgacttgatcgcagaacttagaggtactgcacacttttgctgaagctttagctatcgaccgcctcgaacgtcagctttttgctgaaccctatattttgaaacgcctttttaattattcgtgccatactactgtttatttttagccagcaggcgtaaactccgcgccgtctcctgaaactacagaaaaccaaacccatggaaaaccgtagcgccgctctcccccgacgcgggttcgatgtcacctcttccgccttcttaatcgtcgcctttctgacgggcattgccggggcgctgcaaaccccgaccctgagcctgtttctgaccaacgaagtgcacgtccgcccggcgatggtcggtttcttttttaccggcagcgcggttattggcattctggtcagtcagttcctcgccggccgctccgaccgtcagggcgatcgcaagcagctgattgtcgtctgctgtctgctgggggtgctggcctgcgtactctttgcctggaaccgcaactatttcattttgctgttcatcggcgtttttctcagtagctttggatcgaccgccaacccgcagatgtttgccctcgcgcgtgagcatgccgacaggaccggccgcgaagcggtgatgttcagctccattttacgtgcccaggtctccctggcatgggtgattggtcccccgctggcctacgccctggcgatggggtttggttttaccgcgatgtatctcagcgccgcggcggcgtttatcgtctgcgggatcatggtctggctattcttgcccagcatgcgcaaagcaaagccggtagcgaccggccggctggaagctccgcgcacgcaccgccgcgatgcgctgctgctgttcagcatctgcaccctgatgtggggtactaacagcctgtacatcattaacatgccgctgtttatcattaacgagctgcatctgccggagaagctggcggggctgatgatgggcaccgccgccggactggaaattccgaccatgctgattgccggttactacgcccggcgtttcggcaaacgctttctgatgcgtctttctgcagtggccggggtgctgttttacgtcggcatgctgacggtgcatacgccagcgctgctgctggcgatgcaggtgctgaacgccatctatatcgggatcctcgccgggatcggcatgctctatttccaggacctgatgccggggcaggcgggcgcggccaccaccctctataccaatactacccgcgtcggctggatcatcgccggttcactggcgggggtagtggcggagatctggagctatcacgcggtgttctggattgcgctggcgatgggcgttgtcactcaggcctgcctgtggcggataagagacgtgtaagcacattggtttccatccctctcatctgctgcgttgagctcagggcgcggtggccagctcaagctccagcagccaggtgatcgcttcatcgcggtgggtgaggcacatctccggcgagggctgcaggctggcgcacaccttcgggcgcagaggggaaccgaaaataaggcataaattgcgctcggaaagctggatacaacgggtgttagccggcttgccctgcggcatgccggggatcggcgatgatatagagggggcgatgcaacatgcgccacaatcagtacgacattccacaacccgactcccaaacgctcattttgcgccacagcctaaacgttttgccagaagatagcaaaactcgcgaaatccgcttgcctgaacgcccgggcgcgagtagttttacgcgatatttttgactcgttaagtgacaggattactgcaatgccaagagcgaatgaaattaaaaaaggtatggtgctgaattacaacggcaagctgctgattgtgaaaaatattgatattcagtcacccagcgcccgcggtgctgcgacactgtataaaatgcgcttctccgatgtgcgcaccggcctgaaagtagaagagcgcttcaaaggcgacgatatcgtcgataccgtcaccctgacccgccgtttcgtcgacttctcctacgtcgatggcaacgaatacgtgttcatggataaagaagactataccccttacacctttaccaaagagcagattgaagaagagctgcagtttattccggaaggtgggatgccggacatgcaggtgctgacctgggacggccagctgctggcgctggagctgccgcagaccgctgacctggaaattatcgaaaccgcgccgggtattaaaggcgcgtccgccagctcccgcaccaagccagccaccatgagcaccggcctggtgattcaggtgccggaatacctgaccaccggtgagaaaatccgcattcatatcgaagagtgccgctatatgggccgcgcggattaatcatcggtaacgccccgacagtaaaaaaggacagcgctggctgtcctttttattatccccattgccgcgattacagcagttcagggtatttggtcattttcagcgccagctcgacgccgcgcacttccgccatccccttgagacggccaatcgccgaatagcctgggttggttttcttgcgcagatcgtcgagcatctgatgaccatgatccggacgaaatgggatcgggcgcagatcgccggcctgtttacgccgctgctcttcacgcaggatagcatccaccaccgccaccatattgacgtcgccgctaaggtgcgccgcctcgtggaaggtttttgggtttgcttcacggcaggtagagcgcagatgggtaaaatggatgcgatcgccaaaggtctccaccatcttcaccagatcgttatcggcgcgaacgccatacgatccggtacacatggtgaagccattattaatgctgtccaccgtctccttcagccactgcatatcttcgatggtcgacacgatacgcggcaggccaaggatcggccgcggcggatcgtccggatgcacagccaggcggatccctacctcttcgcataccggcacgatggcgcgcaggaaataggccatattttcacgcagctgcgctttatcaatgtggtcgtactccgccagacgcgcgcggaactggtcaagggtgtagccctcttccgctcccggcaggccggcgatgatattgcgagtcagtttatcgatatctgcttcgctcatcgccttgaaatagacctcagcctgacgctgctcttcttcactgtaatccgcttccgctcccgggcgtttaaggatatgcagctcaaaggcggcgaaagcgatctgatcgaaacgcagcgcccgggagccgtccggcagctcatattccagatcggtgcgcgtccagtcgaggatcggcataaagttgtagcacacggtatcgatgccgcaggccgcgaggttgcggatgctctgctgatagttggcaatccaggtcgcatactgcccgctgtgggttttaatatcctcgtggacgggaatgctttcgacgaccgaccaggtcaacccttttgccgctaacagcgcctgacgcgctttaatctcgtcgaccggccatacctgaccgtttgcaatatggtgcagcgcagtgacgacgccggtcgcccccgcctgccgtacatcatcaagcgataccggatcgttcggcccataccaccgccaggtttgctccatcgctatgtcctcacaaaagttgttataccaataatggcgacactcatggcgactaccatacatgtttctcacctggctgcaaacagtgctggcctattgattgatccagctcacagtcagcggataatttcggcttaccaatttaacttcctgtcatataactttagactggcattgttaataagcagttaaacaggtgtgggaagaatgacaacaattgcaaccgctacgctaccgaagaacgtgcaataccctcaatacgatcgcagccagctccgctcgcgtattgtccatttcggctttggcgcgtttcaccgcgcgcaccaggcgctgctcaccgatcgcgtgctgaataacgtcggcggcgactgggggatctgtgaaatcagtctgttcagcggcgacacgctgatgagccagcttcgcgaacaggaccatctgtttaccgtgctggaaaaaggcgccgacggcaaccagcccattgtgatcggcgcggtgcacgaatgtctgaacgccaggctcgattcgctggcggcgattatcgaaaaattttgcgagccgcaggtagcgattgtctcgctgaccattacggaaaaaggctactgcatcgatccggcgaccgggaaactggatccgacgcatccgcgcattattcacgatctggagaatccgacgctgccgcagtcagctcccggtattttagttgaagcgctggcccgccgccgggaacgaggccttccgccctttaccgtgctctcctgcgataatatccccgacaacggtcacgtggtaaaaaatgccgtcctcggcatggcggaaaaacgcagcccggcgctggcggactggatcgccgacaacgtcagcttcccgggcaccatggtggatcgtattgttcctgcggccacaccggagtcactggcggaaatcgccaccgtgctgggggtcgacgatccctgcgccatcagttgcgaacccttcattcagtgggtggtcgaagatcactttgtcgccgggcgacccgcctgggagacggcgggcgtgcagatgaccgatgacgtgttgccctgggagcaaatgaagctgcggatgctcaacggcagccactctttcctcgcctggcttggctatctggcagggcatgcgcacattagcgactgcatgcgggatgaggtcttccgccgcgccgcccgccagctgatgcttgacgaacaggctccgacgctgaccattaccggcgttgatctgctggcctatgccgacagtctcatcgcccgcttcagcaatccggcgctcaaacaccgcacctggcaaatcgccatggacggtagccagaagctgccccagcgcatgctcgatggcatccgcgtacatctggcgcgcgacagccgttggccgctgctggctctcggcgtggccggctggatgcgctacgtcagcggcacggacgacgccggtcagacgatcgacgtgcgcgatccgctggtcgacaagatccggcagcgggtggcccagagcgatgagcagcagcgcgtcgacgccctgctggggctggaggaaatatttggccgcgacctgccgcacaacgcccagtttgtcgccgggatccgcgccgcctggcaacagctggcgacgcacggcgcccgcgaggccgtcgcccgcgcgctgaattcttaacaatatttgcgcttatgcggacagaattctcttctgtccgcctcaggacttctcttttcccccttttttcgtcaggataggcgtaactgttacaacattacatttatcctggagaaaagagtgaccagaaccaatttgatcaccggctttctcggcagcggtaagacgacctcgattcttcatctgctggcgcagaagcctgcggatgaaaaatgggccgtactggttaacgagtttggcgaagtcgggatagacggcgcgctgctggccgacagcggcgccctgctcaaagagatccccggcggctgcatgtgctgcgtcaatggcctgccgatgcaggttgggctgaacaccctgctgcgccagggcaaacccgatcgcctgctgatcgaacccaccggtttgggccacccaaagcagatcctcgatatcctcaccgcggcggtgtatgagccctggatcgatctgcgcgccacgctgtgcatcctcgatccccgccagctgctggatgaaagagccgtcagcaacgacaacttccgcgatcagctggccgcggcggacatcattgtggcgaataaaagtgatcgggaaacccccgaaagcgcccgggcgctggccgactggtggcagcgctggggcggcgagcgtcgcaaagtgtcggcaatccagggcaatatcgatctgaccctgctcgatgagccacgacggaacaccgccccgctgccggcgagcgcggagcacgcccaccgccatccccccacttccggcctcgccgcgctcagcctggcggaacaccagcgctggcgccgacatctcaacaatggccagggctatcagggctgcggctggatattcgacgcggagacggtctttgacaccatcggcctgctcgaatgggccaggctggcgccagtggggcgcgttaaaggcgtgatgcgcattgccgagggggcggtgcgaatcaaccgtcagggggaggatctccatatcgagaccctcagcgtcgctccgcccgatagccggatcgagcttatttccgcgaatgaagccgactggaacgcactccagacctcgttgttgaggcttcgtttaagttaaggcggctaaggttgccgccgactgtcacaaaatcgcaatggctatgatgaaaaaccgaattcctttaatcctgctgcttaacatcgcgggtgtagcgctattttgctcctggtatctgccagccaaccatggcgcgtggttgccggtcgactccgcgatcttccatttctttaaccatggcgtcagcgtcaaccatgcttatgcctggctgctggcgatcatcaacaatcgcgccttcgacgcctgttcgctgctggcgatgggctgcctgatgctgagctattggctaaaggcgccgactgcaggccgtcgtcagatcgccatcatgggcctggtgatgctgctggcggcggtgatcatcaaccagctcgcacaacacctgatgccggtacagcgcgccagcccgtcgctgttttttagcgatattacccgcgtcagcgacgtcgttaacttccccactaaggatgcgtcgaaggacagcttccctggcgatcatgggatgatgctgctgatcttcgcgagctttatgtggcgctattttggccgtcgcgcgctgggcgtcgcgctgattatctttgtggtctttgctttccctcgggtaatgattggcgcccactggtttagcgatattgccgtcggctccctgaccgccgtgctgatcggcgcgccctgggtattgatgaccccgctgagcgataaactgatcgcctttttcgatcgctacttacccagtagaatatcggccaaataatgtctccggcagccgccagagtcattaactataaggggaccttttgggtccctttttacattttccctttttttcaacatgacgttcatcttcttgtcacattaatcccgtgacaaatgaaggaattgtctgttttttgcccgatattgccgtaattttggcctttcccgatgattcactttttgtcaccaaaatacttataagaaatcgcgcaaaaccgctcgccatgcggcgtttgatagggtaatctcgttctcgttttgccttttccgcagcattaattcagggcatgaataaaattgtgcgtgactgcacaaatttaagcttaaggaattgtctcattgcggatgggtatttaggctctaacacgtttggcattttttataacgacattgtcgttaaggacaacaagggaaaataaacagcatggtcaaatctcagccgattttgagatatatcttgcgggtagcccccgcgattgcagtagcggttctgctttccgcgtgtagttcaacaagtaccgccaggaatatgcattctgagacgcatgctgtgggtagtggcgatttatcatcactgcaagcctctcaggatgaatttgaaacgatggtccgtaacctggacgtaaagtcccgtttaatggatcagtatgccagctggaaaggcgtgcgttaccgcctcggcggcagcacccgcaagggtatcgactgctcagcgtttgtgcagcgcaccttccgcgaacaatttggtctggaactgccgcgttcaacttctgaacagcaggaaaccggaaaatcgatttctcgtgcccaactgcgtacaggcgatctggttctgtttcgcgccggctctaccggccgccatgtcgggatctacctcggcaacaaccagtttgttcacgcctccaccagcagcggggtgactatctccagcatggatgagccatactggaaaaagcgctacaatgaagcgcgtcgagtcctgagccgctcgtaaactgtcctccaccgccgccggttatcccttggctggctgcgggataaaaaacactgccccaggcagtgtttttttttgccacctggttctcaacgtcgcaaaataagctatgtcttttaagtgggaatgagaaaaacgacgaccgacactccgttgatgcgcttcaataatacggaaagaatctggctatgcttactcgctacttttcgccccagcgtaaaacctggttaaccagcctgagcgtggggatcatcgtcgcgctgttggccgggagcattcagtttatggtgatctaccataaccgggccgagcgtttcgacgccattatcaacaatgttaatacctatctgaaaagctattttcacgacctgcgccagaccattgacggcttgcagccgctggtggaccagccctgcgagaatattgactccgggcttacctcccacgccgcgttcagccccaacgtccgcgctttcctgctggtcaaaaacggcatcgccttttgctcatcggctacgggagccatgaatacgcccctcagccagctgatcccggccatcgatatcagcaaacccgttgctatggcgattttaccaggcacgccgatgatgccgaagagcgcggcgctggcgctgtgggtaggtaaacccggcgatcaaaacagcggcattttcgtgtcgattaacgctaatctcacgccgtatatcctctattccgcgcggcaaaacgatttcagtggcattgcgctggccatcgatcacaccgctatctccaccttcagtaatcggctggtggatccgcaaacgctgcataacgcgccgatccgccaggcacagatcgagggcttaccgctgaaggtctacctgtatgccaacagctggctggcggaaaatacgcagtttgctctgctgctcggggtcgtctgcggcctgctggcggggctgctctgctattacgtgctgacgatcaaatcggatccgcgaaaatccattctgctggggatcaaaaataaccagttctacatcgtttatcagccggtggttaatgctcagactctacgtatcagcggcgtggaggtcctaatgcgctggcgccatccggtggttggtgaaattccgcccgacgtttttattaacctggccgaaacccagcagatgatcgtgccgctaacccatcacctgctcgcgctgatcgccagcgacgctgcggtgttgaagcgtattctgccgcgcggcgtgaagctggggctgaatatttcccctgcccatctgcaggccgacagcttccgcgacgatatgctgcgcttcgccgccgcgctgccagccgaccactttcacgtggtgctggaggtaaccgagcgggcgatgattgataaagaaaaatcgatggctaacttcgcctggctccaccgccagggattcgaaatcgcgattgatgatttcggcaccgggcatagcgcgctgatctatctcgaacgctatagcttcgattatctgaagatcgatcgcggttttgtgcaggcgattggtactgaaacagtaacctcgccggtgctggatgcggtactgaccctcagccgtcggctgaaattaatgaccgtcgccgaaggggtggagacccaggaacaggcggagtggcttcgcggccagggcgttcatttcctgcaggggtactggatcagccgaccgctgtcgctggccgggctggtggctgcgcacgatgaacccgcgaactatttcacaacgcgctaagtctcacttatgatgcgggaacggatgtcggccatgggggccggccatgacagggtattctgccgcctatgtatgcgcgcctctttctgattctgctggctctgtttagcctggacgctaaggcgcaaaccattcaggaaagcgtagccttcgcgattatcggcgaaccgaaatacgccgccggtttcagtcattttgattacgtcaatcccagggcgccgaaaggcggcaccctcaccctggcggcgatcggcacctttgataacttcaaccgttatgcgctgcgcggcaaccccgcggtacgcacggaggcgctctacgataccctgttcaccacctcggatgatgagcccggcagctactacccgctgattgccgagcgggcgcgctatgccgaggactattcctggatggagatcgcgctcaacccgcgcgcccgcttccatgacggcacgccgatcaccgcccgcgatgtggcgtttaccttcaacaagtttatgaccgaaggggtgccgcagtttcgcctgttttataaaggcaccaccgtgaaggccatcgcgccgttgaccgtgcgtattgacctcggccagcccggcaaagagaacatgctgagtctgctgagcctgccggtgatgcccgaggcgttctggcgccagcacaaactcagcgacccgctgtcgaagccgccgctggccagcgggccataccgcatcagcgcctggcgaatggggcaatatattacctattcccgggtcgccgactactgggcggccgacctgccggtcaaccgcggtcgctggaatttcgatacgctgcgctatgactattatctcgacgacaatgtcgctttcgaagcctttaaagcgggagccgtcgatcgccgggaagagaccgtcgccaaaaactgggctacccgctacgtcggtcgcaacttcagccgcggctacatcattaaagatgagcataccaatacctcggcgcaggatacccagtggctggcgttcaatattcagcgcccgatttttgccgatcgccgggtgcggcaggccattaccctggcgttcgatttcgaatggatgaacaaggcgctgttttacagcgcctatcagcgcgccaacagctatttccagaacaccgaatatgccgcccgcagcctgcccgacgcagccgagctggccctgctgacgccgatgaaaaaagaactgcccccggagctcttcagccaggtttaccagccgccggtctcccgcggcgatggcttcgaccgcgccaacttactcaaagccgacgccctgctcaatgcggcgggctggacggtgaagaaccagcgccgggtcaacgccgccaccggcaagccgctgcgctttgagctactgctgccggccgggggcaatgaccgctgggtgctgccgtttcagcacaacctgcagcgtctggggatcgtcatggatattcgtcaggttgataattcgcagtacagcaaccgccgccgcagccgggattacgacatgatgccaagcctgtggcgcgccatgccctggccggggaccgacctgcaaatctcctgggcgtccgactatattcactccagctacaacgcgccgggggtgcaaagcccggtagtggataagctgattgcgcagatcctgcagtggcagggcaataagcagaaactgatccctctcggtcgggcgctggatcgtgtgctgacctggaataactacatgttgccgatgtggtatatggcgcaggaccgcaccgcgtggtggaataagttctctttccccgcgacccgccccatctattcgtccggcctcgatacctggtggtacgacgtgaacaaagcggccaccctccccgcggacagacgctaaggacatcccatgggcagctacctgatccgccgtttgctgttagtcatccccaccctgtgggccatcatcaccattaacttttttattgtccagatcgcgcctggcggcccggtcgatcaggccatcgccgccatcgagtttaatcagcgcggcgggatgccgggggctggcgacggcgggatgggcgccagccattcccgcaccggcgcaggcaatatcagcgagggtcactatcgcggcgggcgcggcctcgacccggaagtcatcgccgagataacccaccgctacggcttcgataaacctctccatgagcgctatctgaagatgctgggcgattatctgcgctttgatttcggcgacagcctgtttcgcagcgcctccgtgctgcagctgattaaagacagcctgccggtctcggtgagcctcgggctgtggagcacgctgattatctatctggtctccattccgctgggcatccgcaaagcggtcagcaacggcagccgctttgatatctggagcagtacgctgattatcattggctatgcgatccctgcctttctgttcgccatcctgctgatcgtgatttttgccggcggcagctatttcgacctcttcccgctgcgcggtctggtctcgccaaatttcgacaccctcccctggtatcagaagatcctcgactacctgtggcacatcaccctgccggtgctggcgacggtaattggcggctttgccgcgctgactatgctgaccaaaaacagcttcctcgacgagatccgcaaacagtatgtggtcaccgcccgcgccaaaggcgttggtgagaaacagatcctctggggacacgtgttccgtaacgccatgctgctggtaatcgccggcttcccggccacctttatcagtatgttctttaccggctcgttgctgatcgaagtgatgttctcgctaaacggcctgggtctgctgggctatgaagcgacggtctcccgcgactatccggtgatgtttggcacgctctatattttcactctgattggcctgctgctgaatatcgtcagcgatatcagctatacgctggtcgacccgcgcattgattttgagggccgctaatgtctttcttcagtcccgttaatcaggcccgctgggcgcgctttcgccacaaccgtcgcggctactggtcgctgtggctgtttttaattctcttcctttgcagcctgggcgccgagctgctggccaacgaccgcccgctgctggtgcagtaccggggccagctgtacgtcccggtgttaaaaaactacaccgagcaaaccttcggcggcgcgttcgccaccgccgccgactatcaggatccctggctgcagcagcagctggcgactcacggctgggcgctatggccgccagtgcgcttcggcgcgacgacaattaattttgccagcacggttccctttccatcgccgccctcggccagcaactggctcggcaccgacgccaacggcggcgatgtgctggcgcggatcctctatgggacacgcatctcggtgctcttcggtctgctgctgacgctgttctccagcgtgctgggggtgctggccggagcgatacagggttactacggcggtaaaatcgacctgtggggacagcgctttatcgaagtctggtccggcatgccaacgctgttcctgatcatcctgctctccagcgtcgtgcagccgggcttctggtggctgctggcaatcaccgttctctttggctggatgacgctggtgggcgtggtgcgcgcggaatttctccgcacccgcaactacgactatgttcgggcggcgcaggcgttaggggttagcgaccggcagatcatcctgcggcatatgttgcccaacgcgatggtggcgaccctcacctttctgccctttatcctgtgcagctccattaccaccctgacgtcgctggattttctcggcttcggcctgccgctcggctccccctccctcggcgagctgctgctgcagggcaaaaacaacctgcaggcgccctggctgggcattgccgcgtttctctccgtcgccgtgctgctgacgctactgatttttattggtgaagcggttcgcgacgcctttgatcccagtaaggcggtgtaatatgacccacccgctgttagctatcgacaatctctctattgcctttcgccagcagggtgagacgcagaccgtggtgcacaatctgtcgctcgaggtggcggtcggagaaacgctggccctggtgggcgaatccggctccggtaagagcatctccgccctgtcggtgctgcggctgctccctacccccccggccagctaccccagcggtgacatccgttttcatggccagtcgctgctgcatgcggatgaggcgaccctgcgcggcgtgcgcggcaaccggatcgcgatgatctttcaggagccgatggtatcgctcaatcctctgcacaccctggaaaaacagctctacgaggtgctgtcgttacaccggggaatgcgcaaacaggcggcgcgcggggagatcctcgactgcctggagcgcgtcgggatccgtcaggcgccgcggcggctggcggactatccgcatcagctctccggcggcgagcgccagcgggtgatgatcgccatggcgctgctgacgcgcccggagttgctgatcgccgacgagccgactaccgccctggacgtatcggtgcaggcgcaaattctgcaactgctgcgcgagctgaagcaggagctgaacatggggctgctgtttatcactcataacctgagcatcgtccgccagctggctgaccgggtggcggtaatgcagaacggccgctgcgtggaacacaatgactgtcgggcgctgttcagcgcgccagcgcatccctacacccaacgcctgctggatagcgagccggacggggagcctgtgccgctggccgccgatgccccggtgctgctgcaggcggacgatttaaaggtggcgtttcccgttcgcaaagggatcctgcgtcgggtggtcgatcatcatcgggtggtcaacagccttagctttcagctgcgcgccggcgagacgctgggcctggtgggggaatcgggttccggtaaaagtaccaccggcctggccctgctgcgcctgatcccgtccgggggcaagataaccttcgccggccagccgattcagggccgtaaccgccgacagctgctaccgctgcgccgacagatgcaggtggtttttcaggatccgaactcgtcgctcaatccgcgcctcacggcgcagcagatcattgaggaaggcttgcgcgtccaccagccgacgctgacggcggccgaacgcgaacaggcggtgatccttgccatgcaagaggtcggcctcgacccggccagccgccagcgctatccggcggcgttctccggtggccagcgacagcgtatcgccatcgccagagcgttgatcgtcaaaccgcagctgatcgtcctcgatgaaccgacctcatcgctggacaaaaccgttcaggcgcagatcctgaacctgctgaaagccttacagcgaaagcatcagctggcctatatttttatcagccatgatttaggcgtggtgcgggcgctgtgtcaccaggtgatggtgctgcgtcagggagaggtggtcgaacagggcgagtgcaagtccgtcttcagcgcaccccggcatgagtatacccgccagctgctggcgctaagctgacggtcagaaagggttattgccggagaagggctcggcgatggccacgccaaagtttttcagacgacaggtggcggcaaactcatcctgcaggttaacgaacaggcagggttcaccttcgcactccagcacggaacagtcgacttcgatgtcgcttaacgcctggctgagcttatgcatcaccggccaggctttctcaccgtccgggctcagcaatttcagggcaacgagactgttctcgttctgcgcgccgttttgcggaatcggttcaactctggaacccgcaaaaccggccagccagcgatagctctgcggcagacggtgtacgatagagagttgttgtgtattcacttagtttccccggaagcaaaaggcttcacaataaatttacatcaatattaacacactgttgacaaatagtcctgccttgaggcagaaaacgtttacagcggcggcggaccagggttaagcgcttataatccagcgctttattttttatacccggcgagccgattggcgctatatgtacccgtttctgtgatccaaaacaacttttttatcgcaacaatgcgactttttacactaattgattttacataaaggaaacaaatcgcagaaccctgaagcccattgcggttgacatgcatcaagaaaggggcgatttcgcccctgaaaatgtgacctagcgtgcgatttttcgccgccgggatgcgtaaagcgagaagaaaatagagcaggttgcgcagaaggcaatagagatcagcatcggccaggcggtggtaaacgtcgccatcgacagcagcgcgccgataatcgccccgataccgaaacggaaagtccccgccagcgacgaagcagtgcccgccatatgcggaaactcatcgaggatcaccgccatggcgttagacgacaccatggatacgcagccgacaaaggccgctacgccgatcactagtgaccagaagccgacatccagcagcgcgcagaccaccatccacaccgccatggcaaactggatccacagcccggcgcggaacatacgcaacgcccctacccgccgcacaaaccggctgttgaacatggtcatcagaaacagaaaaacgatgttcagcgcaaaatagtagccaaagtgctgaggcgcgacgtggtttatattgatgtagacaaagggaccggcgctaaggaaagagaacatgcccgcgaagctaaagccgctcgccagcatatagctcagtacccgcttgtggcggaacagcgtggcaaagttacccagcgtggtgcgcagatggaacggctgacgcctttcagccggcagcgtttcgcggacaaacaggccgatcatcagcgaggccagcagggccaccagggcgaggatccaaaagatggcatgccagctgaaccagaccaacaccgccccgccgaccatcggcgccaccagcggcgcaatggtcgtgaccagcatgacaaacgacatcatgcgcgaaaactcatctttcggatagatgtcgcgcatcagggcgttaatcaccacgctggccgccgcggctgccagaccgtggaagaaacgcatgacaatcagcatatcgacggtttgcgacagggcgcaggctaccgccgccgccgcgaagaccagcgtcccgccgaggatcaccggcttgcggccaaggctgtccgccatcgggccgtacagcagctgacccagcgcaaagccgaggatataggtgctgagcgtcatctgcgcgctgccgtccgggacgttatactgggcggcgatcaccggcagggccggaagatacatatcaatagacagcggcatcagcatggccagcaggccaaggataaacacaatccccagtgaagaattctgcttcagcgtcacgttttactccgtggctgcggggcgcccacgctggcgatttccgcttccgtcagcggacgatattcacccggcgccagcgattcatccagcaggatgtcgccgatgcgttcccgatgcaggccaaccacgtggttgcccacggcggcgaacatgcgtttcacctgatggtagcggccttcgctgatggtgaggcgcacttcggtcggagtgataacttccagcaacgccggtttggtgagatctttttcgttatgcagctggacgcctttggcgaacagctcagcggtcccttccgccagcgggctttccagcgccaccagataggttttttcacagtggtggcgcggcgaggtaatgcgatgcgaccactggccgtcatcggtcatcagcaccagcccggtggtgtcgatatccagccgtccggcggcgtgcagcttatgcgccaccggctcgtcgaggaaataaaggatagtcggatgatcgggatcgtcggtggaacagacgtacccttgcggcttgttgagcataaagtaacgcgggccattctgctgggtcagcgtatttccgtcatactccacctcgtgctccggctggagcttaaaagaggcatctttcacaatgtcgccgtccacggtaacgcggctgccgcgaatttcacgcccggcaatagcccggctgacgccgagctgctgagcgataaacttatcaagtcgcatgagatttttttagcctgtcatagtgctggagcgggcaaatcgcccgaaaaagaagaatttcaccggctagtataacgggctcttaacaccactcaagggaaaagattcatggcatactattcgccagttaattagccccgtgaattcatgacttttacattacgtccttaccaacaagaagccgtcgatgccaccctcgcctggttccgtcgccataccgagccggcggcgattgtcctgcccaccggcgcgggcaaaagtctggtgatcgccgagcttgccaggctggcgcgcggccgcgtgctggtgctggcccatgtcaaagagctggtggcgcagaaccatgccaaatactgcgcccttggcctcgaggcggatatcttcgccgccggtctgcagcgaaaagagagccacggcaaagtggtgttcggcagcgtgcagtcggtggcgcgcaatctcgaccagtttcgcagcgaattttcactactcatcgtcgatgaatgccaccgcatcagcgatgatgacgacagccagtatcagcagatcatcggtcacctgcggcaggtcaatccgcagatccggctgctcggcctgacggccacgccgttccgccttggcaagggctggatctatcagttccattatcatgggatggtgcgcggcgatgaaaaggccctgttccgcgactgcatctatgagctaccgctgcgctatatgattaaacacggctatctgacgccgccggagcgcctcgatatgccggtggtgcagtacgatttcagtcgcctgcaggcgcaaagcaacggcctgttcagcgaagccgatcttaaccatgagctgaaaaaacaacagcgtatcacgccgcatattgtcagccagatcgtggagttcgccgaaaaccgcaaaggggtgatgatctttgccgccaccgtggaacacgcccgggaagtgaccggcctgctgccggtaggccaggcggcgctgatcaccggcgaaacgcctgggccggagcgggatcgcatcatcgaggcctttaaagcgcaggcgtatcgctatctggtgaacgtcgcggtgctgaccaccggcttcgacgccccgcacgtcgacctgatcgccatcctccgccccaccgagtcggtgagtctttaccaacagatcgttggccgcggtctgcgcctggcgccggggaaaaccgactgtctgatcctcgactacgccggcaatccgcatgacctgtatgccccggaagtggggacgccgaagggcaaaagcgacaacgtgccggtgcaggtcttctgcccggcctgcggcttcgccaataccttctggggcaaaaccaccgccgacggcaccttgattgaacactttggccgccgctgccaggggtggttcgaagatgacgacggccaccgcgaacagtgcgacttccgctttcgctttaaaaactgcccgcagtgtaatgcggaaaacgacatcgccgcccgccgttgccgggagtgcgacactatactggttgacccggacgatatgctgaaggcggcgctgaaactgaaggacgcgctggtgctgcgctgcagcggcatggccctgcagcacggcggcgacgagaagggcccgtggctgaaaatcacctactacgatgaagacggggcggatgtcagtgagcgcttccgtctgcagacccccgcccagcgcaccgccttcgaacaactgtttattcgcccgcatacccgcacccccggggtgccgctgcgctggataacgccggcggatatcgtgacccagcaggcgctgctgcgccatccggactttgtcgtcgcccgcatgaaggggcagtactggcaggtgcgggaaaaagtgttcgattatcaggggcgttttcgtcgcgccaacgagctgcgttaattaccggaaagctgaggttttgattgcccgggtgtcgtttggcggctataatgccgcccgcttttgcattcgcaaagcagataatccgcctgttgctgggtcgcctgtagcaggctttatatatagagagacatcaatgtttactatcaacgcagaagtacgtaaagagcagggtaagggtgcgagccgccgcctgcgcgcagctaacaagttcccggcaatcatctacggtggcgcagctgctccggttgctatcgaactggaccacgacaaagtatggaacatgcaggacaaagctgagttttacagcgaagttctgaccgtcgttgttgatggcaaagaagaaaaagtcaaagttcaggctgttcagcgccacgcgttcaagccgaaactgactcacatcgacttcgttcgcgcgtaatcgccgatagcaagttgtatggcaagcgccccggggtctcaggctccggggcgttttgttatctgcgcagccaaagctccggcgcctcgtgcacgatgtcgctaagcatccgatgcttattcattccgggcagccagagcatcaccatggtgacgttcagcccctgactgccgacctccgtcgcgatttcactgactccctgccactcgcctggccgcaaatggtccggtaaaaacccccagcccctcccctgctccagcgcatggcgcaacagggtaatttcattcatatacagcgtatggccggaaatctgcagccggcgggcgatttgatcgtcactgcgccggtgcatcactaactgcggcgtcaacgaaagattcaataacgtcagcggccgcggagcgtcgtggaacaggctgtccgccgcgtagaaacgcagatccacggtgccgagcgcccgccactccatttcgctccccagcgtgcggttgttagcctgacaaatcgccatctccgccacgccatcgctcagcgcctgctcggcttcgcgacgcgaggcgctccagcagctcaggcggatctgccgtcgggccaggttatcggccagcgcacagagaaattcacgcggcacgaagggatcgtacaccagacgcagcgcctgcccggcggtttgcggcagcgtttgcgcaaaagactcgaaagcctgcgcctgacgcaacagcagatgcgcctggcgaaacagctgctcgccctcggcagttagcgtcaggctacgtccttcacggctgaacagccggtagcccagcgcatcttccagatagtccagcagatcgcgcagcgtggtccggtctttagctaaacgaatggccgcctgcgacaggctgccggtctcagcaatcgtcgcgaaggcttcaatctgtgcgaatgaatactgtagggttttcatcctttttctcccttaagggggaaaatcccccatgtgctgattttagccggcgcgcgccgatttatatactgcgcagcgaatctatggcaaacgaggaaatgacaatgataagaaaaccactggccctggcattaatattggcggcgctgccggcggcggcaatggcgcaacactgcggcagcctgacgctggatgtctgcccaacgccttacgatcaaacgctacccgcggccaaagacatgctcagctgggatcagacttcacgcgtgattggctttcgcaatcactatcgcaactatgccggcgatgtcttccgccacggcgcctcgacgccgctggagcgcgctgaaaaacaactgaccgatgcccgctatacgctcaacggccacacctggaatttgcaggattacctgaagcgcgagaacgtcagcggtatgctggtgctgaaagatggtaaagtcgcctggaaatatctcgccgaaggtaataccgacaccaccctgtggacctcgcgctcggtaggcaaatcggtggtctcgacgctggtcggtatcgccattcgacagggtaaaatccactcccttgatgacctgattaccgtttatgaacccgaactgaaaggcaccgcctgggacggcgtaacgctgaagcagttgattcaacacaccagcggggtggaatggaatgaagactacaccgacccgcagtcgcatttcgcccgcctgacccagtgtgaagcgcaccccggcgtctatgcctgcgtgcgtaagatcgtcaccggcctggcgcgtcaacacccggcgggcgagcagtggtcctactcttccggcggcgcctggctgcttggggatatcctggagcgcgccaccggcatgtcgctggccgcctggcttgaacaggctctatggcagccggccgggatggcccacgacggcgtgtggcatgcttatcagcaagggaagcacgacgtcggcgcccacggctttaacgccacccttgaagactggggccgctttggtgaattcgtcgcccgtgacggtcggttaagcaatggcaaacagctggtgccgactggctggttcgatcaagccgccagctggaccaaggcgctaaactcggtctcggcagcgcatccggagggtatttacggctatctgtggtggaataacgcgattccggcgaatgcgcaaaacgtacagccgacgccgcaggaagggcttaaagggtcgctgtgggcgctggggatctacggccaggtgatcatggtgaaccgcgcggaacacctggtgatcgtccagtggtcgacctggccgcaggcggaaccttccttcaacgctcagccgttggaagcggcgctgatgtacagcgccattgcccgcgagctgcgttaactccccgctccttgccgctcagccggcgaggagcgtgtcggcattcagcgccaggtgttgcagcaggataatggttttagcatccatgatctcgccatcgcgaatagcctgcagcgcccgcgtcagcggccactccagtacttcaatatcctcaccttccgccgccagtccgccgccgtcgccccgacggtcatcggcctgatattcggcgataaaaaagtagagtttttcggtgacggagccggggctcataaagacggtgaagacgggttcgacacgcgtcacgcgaaagccggtctcctcttccgcttcggcaacgatccgcgcctccggcgaggcgttatccaacagcccggcggccgcctcaatgagatatccgtcgtggccatgagtaaataccggaaaacggaactgacgggtcaggaccaccgtccgcttttcccggttgtagagtaaaatgactgcgccgttgccccggtcataagcctcgcggctctgctcctgccagcgaccgtcccgacgcagcagttcgaaggtatattttttcaacgtgtaccagttatccgagagcagcgtctcgcgaacgtggcggacgtgcggtgcgtgtgtttgcatgttatttcccatttgaggtgacagcaggcaccataacatgcataatcgttcacaaacaagatcattcgatgaaggaaaaccgatgctcgccagtcagagaaaacagcagatcctccagatcctcaccgaggaaaaacaggtgatgtccggggagctaagccagcggtttaacgtctccgaggactccattcgccgcgatctgcgcgagctggcggcggagggaaaactgcagcgggtccatggcggggcattgccggtatccgccgccattgcgccaattgaaacgcgcaaaagcgtgcagatcgcctccaagcaggcggtcgcccgcgccgccgccgccctgatccagccgggacaggtggtgattgtcgatggcggcaccaccaccgcggcgatgatcggctttttacccgccgacctcagctgcacggtggtcacccacagcccgggcatcgccgtggcgctggtggaccacccgcgaatcgaggtgatcctgctcggcggcagagtattcaaacattcggttgtcgccgtcggcgccgagacgctggcgggaatggcgcggatcaacgccgatctgttctttatgggggtgaccggcgtccacccgcgggcgggtttcaccaccggtgattacgaagaggcaggcatcaagcgcgcgctgacggccagggcggcagaaaccgtggtaatggcctcccgggagaagctcaacgccgcgtcggcctttgccatcggcgagctgagcctcgccagtacgctgattgtcgatggagaacccgacgccgcgctgcgccaacagttggtgcagagcggcgtggagatcgtccccgttcagcggtagcgccgccgggacacagggcttaattgccgcctgacgtccggcgctgcagctggtcgcgcagattcggcggggtacccttaatggtcagggtatcagtggcgggatcccagaatacgcgttcgcccagcagcatggcgtcgaagttaatggtcaatccgccgccgctgccggcaaacttggtcagctgacgtaaggtgctgcgatccgccgggaagctctcttccagctcatagccctgctcagcggtgaattcctggaagctcttttcgctgacgccggcgagctctttggacagcgactccagctcaatctcttccccagcctgcagctgttcgttgcagtaggcgtagacctgctggcgcacgttctgtcgctcggatttatcaagctgggcatcggcggcgaagtcatccaccgcctgcagcagaccgcggttctgcgctttggcgttaagcccttcgctggcgccgaggaaatccataaagaaatcggccactttgcgccctacccgccctttcaggaaggtcagatagcgggtcgactccgggttggtttcccattcggtgagatcgatgcgcgcgacgatatcggcatggttaatatccagataatgggtcgagcggatatccagctcttcgttgacgcgcatactgctcaggttattgagtaccgccaccagcagatactcgaccgcaaggtaacgatactggcagaagaggacaatgcctccttcggcgaacgggtatttcgccagctcatcgcgcaggcgaccggtcgccgcgcggctaaacgccagaaactcttcttccccctgacgctgcaggcgcagcgcctgggccagttcgctctcttcattgaacaagccataggctttgcttttggcgctatagacccggtgcagttcagccatcatctcgacgaccgtcgcgttcggctccagcagtgactcgcgcagcaccagctccagattttgttcatcacgtttgattaactgatgcagggcaatctggtcgatatccagactcatgttaaactctccttttagaccgggcggtattcaaccaccgccgggtggccgacgcaactggcgccacacatttcgacgtcgttaacgtcgattgatgcgcttttgcgccgcggcgaaaaaatgcggaaaaaaagctgctgctacggtaatatgttgccctttcacgaacaaacagattttgagtttatgccgcaaatttcccgctatagcgatcaacaggtcgaacagttgctcagcgagctgacgaacgtcctggaatcacacaaagccccggtggacctttcactgatggtgttaggcaatatggtgaccaacctgatcaacagtagcgtcgcgccggcgcagcgtcaggccatcgcccgttctttcgcgcaggctttgcaatcttcgattaacgacgatccagcgcattaaggataacagcaacagtatatggtgactctacgtcagccctaccgagaaaaagtctcccagatggttagctgggggcactggttcgccctgttcaacatgttgttggccatggtgctcggcagccgctacctttttgtcgccgactggccgacgacgcttgccggacgactgttttcgtacgtcagtctcgtcgggcatttcagctttctggtgtttaccagctatgtgctgatcctctttccgttgacctttatcgtggtctcgcagcgcctgatgcgcttcctgtcggtgatccttgccaccgccgggatgacgctgctgctgatagacagcgaggtttttacccgcttccatctgcacttaaacccggtcgtctgggagctggtcatcaaccctgaccagaatgagatggcgcgcgactggcagctgatgtttatcagcgtcccggtcatctttttgattgaaatgctcttcgctacctggagctggcaaaagctgcgcagcctgacgcgccgccgccattacgcccgcccggtcgcctggttcttctttttgtcgttcgtcagcagccacctggtctatatctgggcggacgccaatttctatcgcccgatcactatgcagcgggcgaatctgccgctctcctatccgatgaccgcccgtcgtttccttgagaaacatggcctgctcgacgcccaggattatcagcgtcgtctggtggagcaaggggcgccggaggcggtatcggtccagtatccgcttagcaacctgcgctatcgtgacctcggcgcgggctacaacgtgctgctgatcaccgtcgataacctgaactactcgcggtttgaaaagaccatgccggcgctggcggcatttgccaaagaaaacgttaactttacccagcatatgagctcgggcaataccgccgacagcggcctgtttggcttgttctacggtatttcgcctggctatatggacggtgtcctctcggcgcgtattcccgccgcgctgattaccgccctcaaccagcagggctaccagctgggcctcttctcctccgatgggtttagcagcccgctgtatcgccaggcgctgctctccgatttctcgctgccgagcgcgaagacccagagcgacgagcagacggccaatcagtggatcggctggctggaccgttacgcgcaggatgagaatcgctggttctcgtggatctcgctcaatggcaccaccctcgacgacacgcagcagcagggctttgtccgccgctacagcaaggcggctggcgacgttgatgcccagatcgatcgggtgctgactgcgctgcgcgaagccggcaaactcgataatacggtggtaattattaccggcggccacggcaagccgctgaatgcgaaacacgacgcgttcgactggtcgcgcgagcagctgcaggtgccgctggttattcactggccgggcacgccggcgcaggagattgccaccctgaccgataacaaagatgtgatgactacgctgatgcagcgcctgcttcacgtttcgacgccggccaatgagtactcgcagggagaagatctgttcagcgccgcgcggcgtcgtaactgggtcaccgcggccaacggcgatacgctggccatcaccaccccgaccatcaccgtggtcctcaaccataacggcacctataccacctggagccgcgacggcgagaaaattaaagatcagaaaccgcagctcagtctgttgctgcaggtcctgactgacgaaaaacgctttatcgctaactgattgattaattatgaaccaatcgcgcgtgacccgcttgcattcgcctggggaacgggtaatattgttccccacgcgtcggcacgtagcgcagcctggtagcgcaccgtcatggggtgtcgggggtcggaggttcaaatcctctcgtgccgaccaaaaactccacagaaaccagccttttaaggctggtttttttatgcctgtttcccctgttgccgcccgctcgcttaatttgtgccctttcttcaatgtatcgtgaagatgtacgactatcctgatggtaaattacgtcgtagcatctattattcgaccgtatgactcataagcaggagcggataacatgagagttaatggacttaccaaaggatttttcatccttatcgtcttcattgtaaccctggccttttttgatgttctctcaccctattattccgccatcctttgggctgcgatcctcgcggtgatttttaatccggtcaaaaacaagatccgtacccgcctcggcgagcgcaatggcctcgcggcgctgatgaccatcgtcattatctgtcttatcgtttttacgccgctggctatcattctctcctcgctggcctacgagctcaacctggtgtacagcaaactgcagcataacgacacccagtttccgacggtggtcgccagcctgttcgcccatcttcccggctgggccagaagcttcctcgccgatcataaccttgatagcgcgcagcagatccagcagcagctctctgatgccgctctgaaaggcggtcagtatctggccggcagcgcgtttctgattggcaaagggacttttggcttcaccgtcagcttcggcatcatgctgtatctgctgtttttcctgctgaaggatggaccttatctggtgctgttgatcctcgagtctctaccgttatcaagctatgtgaagcagcatttgttcgctaaattcgccgctgtggcccgcgccacggtaaaaggtaccgtcgccgtggcgctggcgcagggggcgctgggtggctttgccttctggatcgccggtctggacggcagcattctctggggagcgctgatggcgtttctgtcgcttatcccggcggtgggctcggccattatctgggtgccagcggccatctacctcttcgccaccggccagctgtggcagggcgcctttatcgtcggcttctttgtgattgtgattggcctggtggataacattctgcgtccactgctggtgggcaaggataccaggatgccggactatctgatccttatcgccactctgggcggcatggagatctacggtatcaacggcttcgtgatcgggccgctgatcgccgccctgtttatcgcctgctggaacctgctgtcgggacgagaacatgccggcaataccgatgaaatcgatgaagagtttattgaggaagcgaaaaatagccgtaatgaatagctttcccggcagggggctggcggcccgccagcgcctctgttgcgctctgcgcggtcaatgtcttaccagtagataacactattcattttgcaaaaattggtaaataaatcttaacattcagctgagtgatgataggctatctctgtcaggaacgaaaataaaggatgatcaaccgtgaaaaaaatcactacgctagccgtttctctgctgaccgccgcctgcatgtccgctggcgcattggccgcagaccagccgctggaaaaagtcgcgccgttcccgaaagcggaaaaaggcatgaagcgtcaggttattcagctgccgcagcagcaggatgagtcggcgctcaaggttgagctgatgatcggccagacgctggaagtcgactgcaaccatcatcgtctcggcggggaactggaaagtaaaaccctggaaggctggggctatgattactatgtctttgagaagctgagcggcccggtatccaccatgatggcctgcccggacggcaaaaaagagaagaaatttgtcactgccggcctcggggatgacgccatgctgcgctacaacagcaaactgccgatcgtggtatacacgccgagcaatgtcgatgtgaaatatcgcatctggcgcgccgacgagactatcggcaacgccgtcgtccgctaaggcgaacagcgcaaacggcaataaaaaacggcagcccgcaggctgccgtttttgtcagagcgtttatcagagcgcgatatccgccatcggcttgccgccgctcagcggcttcagctccgcctgcggtacctcatccaccgccccagctggctgatatttcagctccagcacttcactggtccacgccagcgctttctcgatctccgccggattgccgtcaagacgaataccgtaggttgggatgatcgccttcagcttggcctgccattccggcgaattgactttatctttaaacactttttccattagctgcagcatgataggcgccgcggtggaggcccctggcgacgcgccgagaagcgccgcgacggtgccttcatcatcgctgaccacttcggtgcccaggcgcagtaccccgcccttcttcgcgtcgcgcttaatgatctgcacgcgctgaccggcctgccacaaccgccagtcctctttccgcgcttccggataatattcgcacagcgcggccagacgatctttatctttctgcatcacctggctaatcagatattttaccagatcgaagttgtccaggccgacgttgagcattggcaaaatatttgaggtattcgtcgaggccagcagatcccacagcgaaccgttcttcaggaaacgggtcgagaaggtggcgaatggtccgaacagcaccacgcgtttaccgtcgataatacgggtatcgatgtgcggcaccgacatcggcggcgcgcccacttcggcctgaccgtagaccttcgccagatggtggttcaccacctccggattttcgcagaccaggaactggccgccgaccgggaagcccgcatactctttggcctgcggaatgccggtctcctgcagcagggtcagcgctgcgccgccggcgccgataaagataaatttagctttaatgacccgcttctgacgacgattgtcggcatccgccagggtgaccgtccagctcttgtcggcgttgcgcttgaagcgacgcaccacggtgcccagctgtagggagaaattatcatgcttttgcagaccggcgatcagctggcgggtaatttcaccatagttgacgtcggttcccacttctgagcgagtggcggcgaccttttgcagcgggtcgcggccttccatcaccagcggcgcccaggctttgatctgctgatggtcttcagaatagcgaataccgcggaacagttcactttgctgcagcgccgcgtagcgcgcacgcaggaagttgacgttatcttcgccccacacaaagctcatgtgcggcacgctgttaatgaaagattttggtttgttcaggacgccgcgcgtcacctgatgcgcccagaactgacgcgagatatggaaggcttcgttgatgtcgaccgctttgtcgatattgatgccgttggcggtctgcggcgtgtagttcagctccatcagcgccgcgtggccggtacccgcattattccacccgtttgagctctcttccgccacgctggacatctgctcaaccatggtaatagaccagtctggctcaagctcctgcagccaggttcccagtgtggcgctcataatgccgccgccaatcaacaatacatccgtctcttgctcatggcgggtgttggtccgagtgctgttgggaccaaccgcctgtgagcgtggtacggccatctttttattcatcggatttgagccttactttactcgctgtttttatttagcgcaggtgatacgattctcacccctcacgttaccaccgaagctcaaaaatttaaatattgtttaaattttaagttctgttttgagatccgttataaaaatgtttaataaatgtatacaccaaatcactttttgtactggtgcgctgacagattccgcgctatcatccctggttttgtgacagaccgcacggaagcagggcctgacaccgctccctctttttttataagctgcgaactttttttatgcctccagtttctgaccccgccgcttccggcaacctccgtcccatcctccgctccccgtctttactgacgcgcgaagtgctggccggcgtgctcaccgccctggcgctcatccctgaagtgatttcgttttcagtcattgccggcgttgacccgcaggtaagcctgattgcttcggtggtgctctgcctggcgatgtcagtcttcggcggacgcccggcgatggtcaccgccgccgcgggctcggtggcgctggtgattggcccgatggtgcatcagcacggcgtggggtacattttaccggctgtcattctggcgggtattattcaaattttgtttggtctgtgcggcatggcgcgcctgatgcgctttattcccccggcggtgatgaccggcttcgtcaacgcccttgggatcctgattttctttgctcaggtgccgcatttctggagtcgacaaccgctaatcgttggcctgttcgtcctgacgctgcttatcgtcctgtgggcgccgcgcgttattaagactatcccggcgccgctgatcgccatcgtcgcgctcaccctctataccgcgaccaccggccagcagctgccgaccgtcggcgatgaagggtcaatgagcggcggcctgccggggttcaccgccctgaccgttcccctgaacctgaccaccctgcagataatctggccgtgcgccctcagcatcgcctttgtcggcctgatggagtccttgctgacggctaagctggtggatgatctcactcataccccgtcgaacaaatcgcgggaaagcgccgggctgggtatcgccaatatccttgccggctgctatggcggcatcgccggctgcgcgatgatcggccagactatcgtgaacgtggaaatgggccgggcccgcagccgcctctcaacggtaatcgccggcctggtgctgctcctgctggtgacagcgctcagccaggtgatggcgaagatcccgatggcggttctcgccggggtgatggtgatcgtggcggtgaaaacctttagctggcatagcattcgcccgggcgagctggcgcgtaatccgtggccggaaacgctggtgatgctggtgaccgtcgccgcgacggtgggaaccagcaatctggcgatcggtgtgctggcggggattgtcgcgatggcgatcatcccccgccgctgcgggcaaaagcgcaggctacattagaaacagcgtcgccagacccagaaaaataaagaagccgccggtgtcggtgatggcggtgatcatcacgctagagccgaccgccgggtcgcgccccagcttcaccatgaccatcgggattatcacgcccatcatcgccgccatcagcaggttgagcatcatggccagcgtcatcaccccgccgagctgcggatcgtcatacagccaccaggtgatggcccccataatcccgccccacaccagaccgttaatcagggcgacccccatttcacgcaggatcaggaaggtaaagctgccgggctggatctgctgcagcgccatcgcccggacgatcatggtgatcgtctggttgccggtgttgccgccgatcccggcgacgatcggcatcagcgaggccagcgccaccagctgtgaaatggtgtgttcgaagccgtcgatgacccgggaagcaataaacgccgtacacagattgaccgccagccacgcccagcgggttttcaccgctttgctgaccggggcgaagacatcctcttcatcgctcaggccgcccatccgccgcagatcgttatcggtttcttcataaaccacatcgacgatctcatcgatggtcaggcgcccgatcagcttgccgtcggcatcaatgacggcggcgctgagcaagtcatcacgttcgaaggtgcgcgccaccttctccgcctcttcgtgcggctgaaaggtgaccgggtcgccctccatcacctcccccacccgcttctgcgcatcattgagcagaatggtctgcagctccagctcgccgagcagcagcttgttacgggtggtaacgaacagcttatcggtgttttccggcattttaccgagacgccgcagatagcgctgcaccgccgccagggtggcctccggtcgcaccgtaatgacctcaaactccatgatcgacccgacgctgttgtcggcgtagcgcataatctggcgaatacgggcgcgcttctcggccggcagggtcgccagcagccgtccggtcaggttgcgcggcagatgctgcagcaggtaaacctgttcatcgatatccagcggctgcatggcctgcagcagctcggggtcgctcatcttgtcgatcaggtcgccccagacgttctctgaggcctccagcagcacttcgccgcgtttatcgtcgggcaccagacaccatagcgcggtgcgggcgtcataggggagcgcttccagcgcatcggcgagatccggcggcggcagatgcgagaccagcatttccacttcggccaggtcatcggccagcgtcccttcatcatatcgttcagccagcgtcagtttgcccagcagcgcggaagtcaccgctttatcggtgctcaagagccaaatcagacgggcgcgctcttcgtcacgcaagcgggcgctttttttatgcaaaacggacatcgatcgggcaatccttttgagaatggtgagccggcctgcgggccggaagccttaagcatagcgcgaggagggggaaataataaccgtcagcgatgtagacgctgaaaatttcagcggcgcccgggcttttcccgggcgcgtggcgattgtcaggccgtacgggccaccgcatcgcgggaagcctgttcccgctcttcgccggtaagttcggcgagctggccggcgcgcatctccagcagacgatcggcgtgctggaagtagtgatcgtcatggctgatggcgaacacggttttgcccatctgctgcatcagcggcagcaggacctggtagaactcgcggcggaaatgcggatcctgatccgccgcccattcatccagcagaatgatgtcccgggactcggccagcgccagcaggagcgccacgcgcttcttctgccctttcgacagccgcaggtcggcgatttttccgttctccagctgcagcttgtgggccatttgcagacgctccagccatgtcgccaccagcgccggatcggcctcctcgccctgcggcccgagcaggcggtcaaacagccagacgtcggtaaacactgcggaaaacagtttgcggtactcctctggcctctccgccgccagcggctggccgtcgacgaggatctgaccggatattggctggtacaggccggtcaggagcatcgccagcgttgacttgccgctgccgttgccgcctatcagaaacaccagctcgccgcgcttcagcgtcagattaagcggccctaccgcaaagcgctggtccggataatggaaggtgacatcgcgcagctccagcgtctgccagtcaggatgcgcctgcggccggggaaagtcggcccggtacggggcgagggagaactgacgcagcttgttaaacgccacctgggcgctgagcagcgtgggcagcgcgccgacggcggagagcagcggcgtgcgcagaaacagcagcgtcagggaataggtcgccgccacggcggtatcggcccagccgaggctgttggccatccagaacaccagcccgatggcgccaagcatcataatattcgaccagttgaccgcgctgaggtggaaggtatcggcgcgaacgatatggtgccggtactcccgggcgtccgggaggtagagctggttaaacacatactccgcgcgctcgcggttgagggtcagctctttacgcccctccagcaccgtctgatagtcgtgatacagtttatcttccgtttcgcgcaggctggccatatgtttgtacacccgcgagaccagcacaaagccgccccagatggtgagcgccatccacagcgccgtcaccagcatcatttttcctgacagccaggcgaggtaggccgcggagccgaacgtgagaatgatcccctgcaccagctccggcaggcgcacaaaggcgatggtgatattgcggatatcgctggtcagcccggcaagcagcgacgcgctgccgatcttctctacttgttcaatctgggtatcgaggatgcgtttaacaaactcaccgcgcagacgatagacaaaatggtggccgagggtggttagcgccagctgcgaacccagggtcaccgccatcagcagccccagcagaccaagaaactccggcaggacccgcagagaggtatcgacagaggtaatcagacgcaggttaatgaaagcgattaagccgatacccagcgcagcgctgagcaggctgagagcaataacgcccagaaacggccagcggtactggcgccagacgagagagagaagttccataacaggctatccgcaaaagcaaaacagccagcagtttaaacggctcgccgatgacatcaagaataattcttattttaatactggcgaccgcccgcctgtcggaaggtgagattgtaacgacagtcgcccgtttccggatgatgccccgctttcagcggctgaatgccatgataaaacaggcgcgactcgccgccccagaccaccacatcgccatgctccagcagcagccgctgcagcgggtcgctgcgttgcaagccgccaaactgaaagatggccggcaagcccagcgagaccgagacaatcggcgcccgcagatcctgttcatctttatcctgatgcaacgacagttttgcgccaggacaatagcggttaatcaaacaggcgtcgggggaaaactcgggatagccgccggcggcggccgccgccagcgccagttcatgaaatacggcaggcatcggcggccaggtttgatcggttaccgggtcgaccggggcgtacaaatagccgtggcgatcggtagtccagcccagcgcgccgcagttggtcatggcgaccgacatggtgtacccgcccggcgtgaccatctggcgaaacggcgactgactggcgacgtcggctatcgcctgcagcagcgccggggcgcgttcgcgggcaaatcgccgcagcaccaccgcgccgggggccagcggctcctgccacggtggggtatcgctaaacagatcgagcattactcctcctcatgttgggcctcgcgcgccagcagctgcgcttttcgcgccgttccccagcgataaccggacagggcgccatcttcacgcaccacccggtggcagggaacaatcaccgccagcgaattcgccgcgcaggcgccggccacggctcttaccgcccgcggctggccaatatgctctgccacctggcggtagctgcgggtctcgcccgccgggatctgccgcagcgcctgccagacctgcagctgaaacgcggtgccctgcagatccagcggcagcgataccggccgccggctgtcgtcgaggtgggcgaaaatctcggccatctgctgacaaaaatcggggtcgccttcacgcagctcggcattgggaaagcgccggcgcaggtcgtcgagcaatgccgcatcgttatcacccggcagcaccgcgcagacgccgcgctcgctctgcgccaccaggcaacgacccagcgcgcagtcgcccgtggtccaggttaccacggtggcggcgccgccgcggcgaaactggctggcggtcatccctaacgctgcgtcggcctggcgataatagctgctgctgtcgggaaaaccagccgccagcgcggcgcgggtcaccggtatcccctgctccagcgcttcccgcaggcgctgcgcccgccacgcttgttgccaggctttaggggtcatgccggtgacggatttaaataaacggtggaaatgaaacgggctcatcgccagctggcctgccagcgcctcgagggtcaggggcgcgtcctgctccagcagccgacaggcctgcgccactttgtcgaccctttgctgctgcgggtagtctttatccggttggcagcgtttgcaggggcggaatcccgccgccacggcggcggcgacgtcggcaaaaaagcgtacgttttcccgccgtgcgcgccgcgagcggcaggagggacgacagcagatgccggtggtcagtaccgcaaagacgaactgaccatcggcccgggtatcacgttcgcagaccgcctgccagcggcgatcatcggtatcggcaactatcggtttcatgacgggtctccagctgtaagtgtaccctcagtctgtggtaaagcccgcagtaaaaaacccgcaatcttgctttttaatttttctcgccgacaaggaaagtgcggaactgcggcgacatccaggttttaaaaccctctccttctttaacgatcatgtagaccgccagcccctcctcgcgcaccacctgctgcgctttttccggccccagcaccatcagtccggtatcccagccgtccgcctccagcgccgttggcgcaatgacggtcacggagaccagcttatgggttatcggctgcccggtctgcggatcgataacgtgcgagatgcgtttgccatcgagttcatagtagttgcgatagctgccggaggtgctgatgccgtgaccattgatgtcgacaatcgcctgaacggcgttttcgcggtcggtcggtttctggatcgctacccgccagggcttgccttcgccgttcatcccgcggctgaccagcgccccgcccaccgacaccagatagcgggagatcccctcctgctccatcaaccgcgcgaggtggtcggcggcatagccttcccccacggtggagaggtcgacaaacagatcgggaatatctttttgcaggaactgcctgccgctctgattaataacctgcagatgctgcaggccggtgcgcgccttcgccgcggctatcgcctcggcatccggggtggtgaccggctgtttatccgggccaaagccccacaggttgaccagcggccctacggtaatatccatcgcgccgtgcgttttggcgccaatccgcagcgacagggtgacgatatccgccatcgcttcgctcaccggccagggttcggtagtggcggcatgattgaagcgcatcagcgctgagtcgtttttccaggtcgacagcaggcgatcgtcggcgtccagctgggcctgaaccttggcgcgcaacgcctgggcctttgcctcatccacgccaatgacgctgacccgccagaaggtgcccatcgttttgccatccagcacggtggccgtcgcggtgggggtcgcaggagtggtagctgaatcgcagccagagagcagaacgcaggcgcccagcagcgcggcgcgaaagaaagtcatatccattaatcgaggctcctcttaccagggcgacaagagtataccagcgaggttaaaccggacataaaaaaaggcgccagaggcgcctttttgttatgcagcttgcaacttagaactggtaaaccaggcccagtgcaaccacgtcgtcggtagagataccggcgttgcgggtgaagctgttgtcgtccagcaggttgattttgtagtcaacataggtggacatgtttttgttgaagtagtaggttgcgccaacgtcaacatatttcaggatgtcctggtcgccgtagccttccagatccttacctttagactgcaggtaagccacggacggacgcagaccgaagtcgaactggtactgagcaaccacttcgaagttctgcgctttgttagcaaagcccagggaaccggcgcgggtcgcgttgtaggtctgggtgtactgagtggccaggtagatgttgttcgcgtcgtatttcagaccgccggtgtaggtttcagcgttgtcgccacgacccagtgccagcttgctgttctggtcgccaagacgtttggagttagagtatgcgaaaccagcgctgatgccatcatagatgtcataggtcagagaagtaccgtaaccgtcgccgttctgtttcaaggcggtacgaccgttgttggtaggagacagagcgccttcgccgctcgggctgccgtttttaccctgatactgcagagcaaagttcaggccgtcaaccagaccgaagaaatcagagttacggtaggttgcaacgccgttagcacgggactgcaggaagttgtcagaaccgtaggtgtcgccgccgaattccggcagaacgtcggtccaggacgttacgtcgtatactacgccgtagttacgaccgtagtcgaaagagcccgcgtcgccaaatttcaggcctgcgaatgccagacgagtccatgcctgatcgctggagctttcagtgttgttcgcctgaacgttgtattcccactggccgtaaccggtcagctggtcgttgatctgggtttcgcctttcacgcctacacgcatgtaggtctggtcgccgtcgacgctcttgtcgtcagagaagtagtgcagaccgtcaattttaccgtacaggtctaatttgttgccgtctttgttataaatttcagccgcatttgctgcgcctgctaccagcagagccggtaccaggagggacagtactttaactttcatgttattaaccctctgtttgttatatgccttttattatgccactgcttactgattacccttctaatcagtcggctatttcattgtgctgcaaaatgcagaataatccaacaagaatatgatactaaaacttctaagatgtttcaaagttcccacaagatgtttcaatttgtaaattcagcggaacttttttcaccgcaaaatggtcagggaaatacgcactaatcatcaaaaaaaatatttaaccttttataatcaaattgatagacaacaacatatctatagcactgaatggtaaaacaaaatgatcattggtggctaaaataagagtcgctatcatcattaactttatttattaccgtcattcagttctgaatgtctgtttacccctatttcaaccggatgcctcgcatccggttttttttacccttctttacacaactttaatttatctgtgctacggctaatgattccctaacgactattaatcaatcaattaggccatcagtggtgcatattctgccaatgtcttgttatttcgtgcgattcttcccttttgtttccgtcaatatcgtcgctggttaaccttcccggcgcggtttcatttacgcttcgtttctaagataattcctggacggcatcgcaccgctggcaccaatctgtagtatggatttacgccattagcctttatactgccagcagcatctgctttgttgccagttactctggcgctacatcctgtttacaaacaatgatgagtcgttcagccacaagatgaccccgaaaaaattctccctgatccccggcaacatcagccgcttcttcattttgatggttattgtcctgctggcgacaatgggggtgatgatccaaagcgccgtcaatgcctggctgaaggagaaaagctatcaggtggttgatgtctcccacgctctgcaccagcgcattgacgcctggcgctatgccacctggcagatctacgacaatatcgccgccacctcagtcaacaccgcaagcggcggtctgcaggagacgcgtttaaaacaggacgtttactacctggagaaaccccggcgtaaaaccgaagccctgatctttggctcccatgacagctccaccctcgaaatgacgcagaaaatgtccgattatctcgatattttgtggggcgcggagaccattccgtggtcgatgtactatctcaacggcctggacaatagtctgatcctggtctccaccctgccgttgaaggacctctcttcgagcttcaaagagtcaacgatcagcagcgtcgtggagtcgcggcgcgcggaaatgctgctgcaggctaatacccttgatgagcgcgagacgttctcgccgctgcgccatctcgcctggcagaacgcgcactattttacgttacgcaccaccttcaaccagcccggacaccttgccacggtggtcgccttcgatctgccgattaacgatctgatcccgcccggcatgaccatcgacagcttccgtatcgagcctgacccgtcgcaaaatctcgccaccacgccggataaagagagcgccgatcatattgggatcacctttaacggcatgcagattgacatcgccaccgacatcagcaccaccggtatgcagttgctgtggacggtaccaatgagcaccatgctgctggagtccatgcagaacattcttctgccgctgctgctcaacattggtctgctggcgctggcgctgtttggttttaccacctttcgccactataaaggacgcagccattcgtctggcgccgggctcccctccgccgccaacagcgaactgcgtctgctgcgcgccattaacgaagagattgtttctctgctgccgctggggctgctcgttcacgatcaggaagccaaccgaacggttatcagcaatccaattgccgaccatctgcttccgcacctgaatctgcagaacatcactaatatggcggaccagcatcagggggtaattcaggccaccgtcaataatgagcagtatgaaatccgccagtatcgcagccaggtagcgccgcgcacccagatcctgatcatccgtgatcaggaccgcgaagtgctggtcaataaaaagctcaagcaggcccagcgcttgtatgagaaaaaccagcagggacgggccgcctttatgcagcacatcggcagcgccctgaagcagcccgcgctgacgctggcggcagaggcggcggcgctcagtagtacagagaatcggacgctggcccagcatgccgatgagctggtcaaactcatcgatgacattcagctcgccaatctgctggaaagcgatgcctggaaaaccaaccagacgttgttctcggtgcaggagcttattgacgacgtcgtgccggaagtgctgccggcgatgaaacgcaagggtctgcagctgctcatcaacaatgcgctcccggccggcgagcagcgctatggcgaccgtgaagctctgcggcgcacgctggtgctgttaatccaatattcagtgaccaccacgcctatcggcaagatcaccctagacgtctgtcaggatgagtcggccagcgatcgcctgaccttccgcattctggataccggcaacggcgtctcggcaaacgagatcgacaatatgcacttcccgtatctcaacgagacccagagcgacctgtacggcaaagcaaacgcccttaccttctggctatgcgaccgcatgacgcgcaagctgggcgggcaattgaccattaaagcccgggagtcgctggggacgcgctataccctgcatctgaaaatgccggccagcgaagaggcgccagaggcgggagagcatttgctggatgacgttatcgtcctgctggatgtgacttccagcgaagtgcggcggattgtcactcgccagctggagagctggggagcgtcctgcatcacaccggacgatcgggcgaccagtcaagcctttgatctttatttaacggataatccgtctaatcttactgcttcaggcttgcttttaagcgatgatgaggtcgggatacgcaagatcggcccgggccaactgcgggtcaactttaatattagcacggcgatgcaggaggctatcctgcagcttattgagcagcagctggcggaggaggcggttcagcccgtcacctcaggaaacgagagtaacgccgaactccatgccagcggctattacgcactgtttgccgatacggtaccggatgatgttcagagattgtatactgaaatcgaagcgggcgattttgctgctctggcgcaaaccgcccaccgcctcaaaggggcatttgctatgcttaatctgatacccggcaagcagttatgtgaaacgcttgagcatctgattcgcgaaaaggatgcgcaaggcatagaaaaatatatcagcgacattgacgcttacgtcaagagcttgctgtagaaggtagccttatacatgaacactatgaacgtaattattgccgatgaccatccgatcgtactgttcggtattcgtaagtcacttgagcaaattgagtgggtgaacgtcgttggcgagtttgaagactccacggcccttatcaacaatcttccgaagctggacgcccatgtgctgatcaccgatctgtccatgcccggtgacaaatacggcgacgggatcacgctgattaaatacatcaagcgccacttcccggatctgtcgatcattgttctgaccatgaacaacaatccggcgatcctcagcgcggtgctggatctggatatcgaagggatcgtcctcaagcagggggcgccgaccgacctgccaaaagcgctggccgcgctgcagaaagggaagaaattcaccccggaaagcgtctctcgcctgctggaaaaaatcagcgccagcggctatggcgataaacgcctgtcgccgaaagagagcgaagtgctgcgcctgttcgccgaaggtttcctggtaaccgagatcgccaaaaagcttaatcgcagcattaaaaccatcagcagccagaagaaatcggcgatgatgaagctgggcgtcgaaaacgacatcgccttgctgaactacctctcttccgtctcgctgagcgcgacggacaaagagtaatctcttcgccctctccgtctcgccccggcgagacggagctccccattattcccgccctttacgcacccgcgccgcatataccgtcagcgtttgcttcagtacgtcgagggtgaccggcttggacagacaactgtccatccccgattccagacagcgctgcttctcttccgccagggcattggccgttacgccaatcaccggcagcgtcaggccaagctgacgaatgcgctgcgtcaggcgataaccatccatattaggcatgttgacgtcgctgagcacgatatcgatgtgctgcttgctgaggacgttgagcgcgtcgatcccgtcgttcgcggtcacgcactggtagccgagcgaacccagctgatccgccagcaggcggcggttgatcgggtgatcgtcgaccacgaggatcatcatgtcgtcgttattgccggcctgcgcctccggggccatcagcgccgggctattttccgcactggcgagcgcaacatggaaaatacgccccagcagcggcagcagttcgtggggagtcgtcacgctgtgcagccattcgccggcggaccgctcctgcggaataccgatatgacggcgacagaagatgaccatggcccttccctgccatccgctcagcgcctcatcgtcagtgagtaagacatcctcggcgtccggcgtttcgccggcatggcggcggaccgtcaggccgtggtagctgagcagcgaggtgacgaacatcgccagcgaagtgttatgaatcgccagccagcaggtcttgccagcgaaaccgtctctgctcaccggtgaggtattctgcacgccatacagaggaatacggatggtaaagcggctacccatccccggctcggtttcgacagcaatatcgccatccatcatgctgatcagtttttcacagatcgccaggccaaggccggtgccctgaaaattgcgctgcacgccggtccccacctggaagaaaggatcgaagaggcgcaatacctctttcgccgggatcccctctccggtgtcgcgaacgctaatctgcagataatcccccgcgcactggacgtgcaggacaatacagccggtatcggtgaactttatcgcattgctgagcagatttgagatcacctgctgcaggcgcatcgggtcgccggacatttgttccggaacgtccggctcgataaagcagtacaggcccagctgcttgcgcaccaccaacggcagatagttagcggagatatggttcatgacttcgcgcggagagaactcccgtggctcgatcttcaactgctcggactcgattttcgagaaatcaagaatatcgctgatgattttcagcagcaggctggaggagttgttcatcgccgtcacaaggcgatcgacgcctttcggcaacgctttggtctgcagcagatcgaggttaccgatgatgccatacagcggggtacgcagctcatggctaactgtcgccaggaacatcgatttcgactggctggcctgctccgccgcctgggccatctcctgcagcgactcctccattttcacgcgggcggaaacgtccaccagcacgcaaatggcgacgttttcattgcgatagcgtgaatgaacaaagctaatctgcaggttggtatggttgctggtcagcacgtcgacaaaattgacctgctggccgcagatgatctgcgtcagccgctggcggtcctcgtgggtcagcatgttcaggtagttgtgcgccagttcattactgagaatattggtcccgtcggcagtgcgcagaatacagatccctaccggggcagaagccacaattttgcggttgaactgctcgtgctcttccaggcgctgggcgtcattctccgcggggataaaaatgcgccgctcatacatccgcgccagcgcgaacagcatcgcgccgctgaggatattaagaacgatagcattgatgatcagcatacggatccgctccagcacctgatctaccgagacggaatagacgatgctcagggaggacggcgagaggctttttttcagcaccagctcgcggaaacccgaactgtagccaaaccacatccgctcctgcatccacttcgcttcgctctggattttaccttccgcaccggccagcgaaatcagcggctgcccgttatcgtcaaagatcgtcacgctcatcggcaggctgcccggcgtaaagaagctttccatgcggatggtctgctccacgcccagcatcgcctgcaggcgattggccatatagaccggcgtcagggcgtaaaaatagcccaccccggggcgaacgccctggcttatccagaacaggttgttgccgcgctcgttttgcggcgcgttgcgatattgctctatgcgctgatgcaggactttcagcgcctgatcgcgctcaatcggcacgtcccgcaggccaaagttggccatgcagaggttatcgctgccgatgagaaagatgcggttaaggtcgtaggcggcagtaaaattatcccgccagtagcgcataaaccatgccagcgactgcagcgaattacgccaggtggcgctcatcgcgctgcagtcggaatcggggtacaggggttcaaagttgggcaccgccatatcgccgttttgcccttgcgctaccgcgtcccctgccgacaagcgattaccggcgacatacttcagctctttcattacatccgcggtacgctggatatagcgctgggcctgatcggcgttgagattaagctcctgatggatttcggcttcccgctcgtgcagcgcgttgacgatataaaacacagagacaaacgcaataagcagccacagcaataccgccagcgctctgaacagataacgtgaaaccttcagggttgtatgaaaagaggcaagatatttcaatgtggcgatgctcggccgtcagggactcaacagaatgcggttaaggtagcggtaaaccggctttgccgcaatgttaatgcaaaaagggccgggaaaatacccggcccttccagaacatttacctcggacgattattcttcgtcttcggcgatgtcgtcatcggtatccgcttccggggcgatatcatcatcgccttctgccgcgctaccgtcgatggcatccagctcttcatcatccaccggctcagccacgcgctgcagacctaccacgttttcatcttccgcggtgcggatgaggatcacgccctgggtgttacggcccacgatgctcacttcggaaacgcgggtacgcaccagcgtcccggcgtcggtgatcatcatgatctgatcgcagtcatccacctgcacggcgccgaccacggaaccgttacgctcggtgactttgatcgaaataacgccctgggtggcacgcgacttggtcggatactccgccgccgcggtacgtttaccgtaaccgttttgcgtcaccgtcaggatcgcgccttcgccgcgtggaataatcagcgagacgacgctgtcgttttccgcaagcttaataccgcgtacgccggtggcggtacggcccatggcgcgaacggcgtcttctttgaagcgtacaaccttaccggccgcggagaacagcatcacttcatcctgaccagaggtcagatcgacgccgatcagctcatcgccttcgttcaggttgaccgcgatgataccggcggaacgcggacggctgaactcggtcagcgcggttttcttcacggtaccgctggcggtcgccataaagacgttgacgccctcttcgtactcgcggaccggcaggatggcggtaatgcgctcatcggcttccagcggcagcaggttgacgatcggccgaccgcgcgcgccgcggctggcttccggcagctgatagaccttcatccagtacagacggccgcggcttgagaagcagaggatggtgtcatgggtgttagccaccagcaggcggtcgataaagtcttcttctttaatgcgcgctgccgatttgcctttaccgccacgacgctgtgcttcgtagtcggtcagcggctgatacttcacatacccctgatgcgacagggtgaccaccacatcttcctggttgatcagatcttcgatgttaatatcagcgctgttggcggtgatttcggtacgacgttcgtcgccgaactggtcgcggatcagctccagctcttcgcgaatcacttccatcagacggtcggcgctgccgagaatgtgcagcagctctgcgatctgctccagcagctctttatattcgtcgagcagtttttcatgctcaaggccggtcagtttctgcagacgcagatccagaatcgcctgagcctgctgctcggtcaggtagtatttaccgtcgcgcacgccgaactctggttccagccattccggacgcgcggcgtcatccccggcgcgctccagcatcgccgcaacgttaccgagatcccacgcctgggcaaccagcgccgttttcgcttctgccggggtcggcgcgcgacggatcagttcgataatcgggtcgatgttggccagcgcaacggccagcgcttcgaggatatgcgcccggtcgcgcgctttgcgcagttcgaaaatcgtacgacgggtcaccacttcacggcggtggcgtacaaacgcggcgatgatgtccttcaggttcatgatcttcggctgaccatggtgcagagctaccatgttgatgccgaaggagacctgcagctgggtctgggaatagaggttgttaagcaccacttcccctaccgcatcgcgcttcacttcaatcacgatgcgcatcccgtctttatcagactcgtcacgcagcgcgctgatgccttccacgcgtttttctttgaccagctcggcgattttctcgatcaggcgcgctttgttcacctgatacggaatttcgtgcacgatgatggtttcgcggccggatttcgcgtccacttccacttccgcgcgcgcgcgaatgtacactttaccgcgaccggtgcgataggcctcttcgatgccgcgacggccattgataatggcggcggtcgggaaatcagggccaggaatatgcgccatcagcccttcaatgctgatgtcttcatcgtcaacatacgccagacagccgttaatcacttccgtcaggttatgtggcggtatgttggtggccatccctacggcgatcccggaggcgccgttcaccagcaggttaggaattttggtcggcatgacgtccggaatacgctccgtaccgtcatagttgtcgacgaaatcgaccgtctctttttcaagatcggccatcagctcatgagcgattttcgccagacgaatttcggtataacgcatcgccgcggcggagtcgccgtcgatggaaccaaagttaccctggccgtccaccagcatgtaacgcagcgagaacggctgcgccatacgcacgatggtgtcgtataccgcgtagtcgccgtgcgggtggtatttaccgattacgtcaccaacgacacgggctgattttttataggctttgttccagtcattgcccaatacgttcatggcgtaaagtacgcgacggtgtaccggcttcaggccatctcggacatccggcagcgcacggccaacaatgaccgacatcgcataatccagataagagttcttaagctcttcctcaatgttgaccggtgtaatttctctcgcaaggtcgctcatctaaccgctatccctctactgtatcccggattcaaaggtcgcaaattataacacagccgcgctaatagaggtaaagcaatacggtttattcatggcgcgctgctgatatactcgcaggtctgaacagaaaaggagtaaaagcgcccatgaatgccgaaaaaacgtcggtagcccctaacgtcgatcatgctgaaatcgccaaattcgaagccgtcgcctcgcgctggtgggatctggagggcgagttcaaaccgctccaccgcatcaacccgctgcggctgggctatattgccgaacgctccggcggcctgttcggtaaaaaagtcctcgatgtcggctgcggcggcggcatcctcgccgagagcatggcgcgcgaaggcgcgacggtcaccgggctggacatgggggccgaaccgctgcaggtcgccaggctgcacgccctggagagcggtattcaggtagactatgttcaggaaacagttgaggaacatgccgcgaagcacccgcagcagtatgacgtcgtgacctgcatggagatgctggagcacgtccccgacccgcagtcggtggtgcacgcctgcgcgcggttagtgaagcccggcggccaggtcttcttctccaccatcaaccgcaacggcaaggcctggctgatggcggtagtcggggcggaatatgtcatgaagatggtgcccaaaggcactcatgatgtgaagaagtttatcaagccggccgagctgctgggctgggtagatcagactactctgaaagagcagcatatcatcggtctgcattacaatccgctgaccaataccttcaagttagcgccgggggttgatgttaactatatgttgcatacaaccgccaaacaggactgaggtcagcacctccgcttatgatgattgcgcggcatcaagccgcgtgattatttcttccgatgaagaaatcagcactcgatcaaattttcatttttttttctgttttattgacttcttctccaggccttatgcgacgtggacttgcggattattacccttccgcaacctcaatttaacgtcaaaatcaacccttgtactcaaaagattccttactaaaatactcaccatatagcgtttcttttatcgacaaccccctacatatagtatttatccacagagttagtcacaacggccttctgtggataaacgggggatattttctttcacggacaggtaaaatccacatgaatcagagtctgctggtgacaaagcgcgacgggaccaccgagcgcatcaatctcgacaaaatccatcgcgtactggattgggcggcagaaggactgaataacgtttcgatttcccaggtagagctgcgctcccatatccagttctatgacggcatcaaaaccgcggacatccacgaaaccattattaaagccgctgcggatctgatctcccgcgacgcaccggattaccagtacctcgccgcgcgtctggcgattttccatttgcgtaaaaaagccttcggtcagtttgagccgccggcgctctacgatcacgtggtgaagatggttgagaaaggtaaatacgatcatcatctgctggaagactacacggaagaagagttccagcagatggacggtttcctcgaccactggcgcgacatgaacttctcctacgcagccgttaaacagctggaaggcaagtatctggtacaaaaccgcgtcaccggcgaaatttatgagagcgcgcagttcctctatattctggtcgccgcttgcctgttctcgaactatccgcgcgaaacgcgtctggactatatcaagcgtttctacgacgcggtgtccacctttaaaatctcgctgccgacgccgatcatgtccggcgtgcgtaccccaacccgtcagttcagctcctgcgtgctgatcgagtgcggcgacagcctggattccatcaacgccacctccagcgcgattgtgaaatacgtttcccagcgcgccggcatcggcatcaacgccgggcgcattcgcgcgctgggcagcccgatccgcggcggcgaagccttccacaccggctgcattccgttctacaagcatttccagaccgcggtgaaatcctgctcgcagggcggcgtgcgcggcggcgcggcaaccctcttctacccaatgtggcatctggaagtggaaagcctgctggtgctgaaaaacaaccgtggtaccgacgccaaccgcgttcgtcacatggactacggggtacagatcaacaagctgatgtacacccgtctgctgaagggcggcgatattaccctgttcagcccttccgacgtcccgggcctgtatgacgccttcttcgccgatcaggacgagtttgagcgcctgtacacccagtacgagcaggacgacagcattcgtaagcagcgtattaaagccgttgagctgttctcgctgatgatgcaggagcgcgcctctaccggccgcatctatatccagaacgtcgaccactgcaacacccacagcccgttcgatccggtagtcgccccggtgcgtcagtctaacctgtgcctggagattgctctgccgaccaaaccgctggaagatgtcaacgacgaaaacggcgaaatcgcgctgtgcaccctgtcggccttcaacctcggggctatcgacagcctcgacgagctggaagagctggcagtgctggcggtgcgtgctctggatgcgctgctcgactatcaggattaccccatcccggcggctaaacgcggcgcgatggggcgtcgtacgctgggtatcggcgtgatcaacttcgcttactatctggcgaagcatggcaaacgctactccgacggcagcgccaacaacctgacgcacaaaacgttcgaagcgattcagtactatctgctgaaggcctctaacgagctggctatcgagcaaggcgcctgcccgtggttcaacgaaaccacctatgcgcagggcatcctgccgatcgatacctataagaaagatctggacggcatcgtcagcgaacccctgcactacgactgggaagcattgcgcgaatccattaaaacccacggcctgcgcaactccacgctctccgcgctgatgccgtccgagacctcgtcgcagatctccaacgccaccaacggcattgagccgccgcgcggccacgtgagtatcaaagcgtccaaggacggtatcctgcgccaggtggtgccggattacgaaaacctgcagaacgcctacgagctgctgtgggagatgccgaacaacgacggttatctgcagctggtgggtatcatgcagaagtttatcgaccagtcgatctctgccaacactaactacgatccgacgcgcttcccgtccggaaaagtgccgatgcagcagttgctcaaagacctgctcaacgcatataaattcggcgtcaaaacgctgtactatcacaacacccgtgatggcgctgaagacgcccaggatgacctggccccgtccatccaggacgacggctgcgaaagcggcgcttgtaagatctaaggtatttttgccgggtaacgctacgcttacccggcctacgtttgtgtaggcccggccaacccattcctgccgggcaatacagttcaacaggactcacttcaatggcatacaccactttttcacagacgaaaaacgatcagctgctggaacctatgttttttggccagccggttaacgtggcccgctacgatcagcaaaaatacgacatctttgaaaagctgattgaaaagcagctctccttcttctggcgcccggaagaggttgacgtttcccgcgatcgcatcgactaccaggcgctgccggaacatgaaaaacatattttcatcagcaacctgaagtaccagacgctgctcgactccatccagggccgtagcccgaatgtggcgttgctgccgctgatctccatcccggagctggagacctgggtagaaacctgggccttctccgagaccattcactcgcgttcgtacactcacatcatccgcaacatcgtcaacgacccggcgaccgtgttcgacgacatcgtcaccaacgagcagatccagaaacgtgcggaaggcatctctcactattacgattcgctgatcgagatgaccagctactggcatctgctgggcgaaggcacccacaccgtcaacggcaaaaccgtgaccgtgaatctgcgcgagctgaaaaagaaactctatctgtgcctgatgagcgttaatgccctggaagcgatccgcttctacgtcagcttcgcctgctccttcgcctttgccgaacgcaaactgatggaaggcaacgccaaaattatccgcctgatcgcccgcgatgaagcgctgcacctgaccggcacccagcatatgctgaacctgctgcgctccggcagcgacgatccggaaatggcggaaatcgccgaagagtgcaagcaggagtgctatgacctgttcgtgctggcggcgcagcaggagaaagagtgggcggactacctgttccgcgacggctcgatgatcggcctgaataaagatattctctgccagtacgtcgagtacatcaccaatatccgcatgcaggcggtgggcctcgatctgccgttccagacccgttccaacccgatcccatggatcaacacctggctggtctccgacaacgttcaggtggcgccgcaggaagtggaagtcagttcttatctcgtcggccagatcgattctgaagtcgatgccgacgatctgagtaacttccagctgtaatgaagcggatcttcctgaaaatctctgacactcgccttgagtgtcaggatgaacacccttccctgctggcggcgctggagtcgcataatatcaacgtcgaatatcagtgccgcgaaggctactgcggctcctgccgcacgcgtctggtctccggccaggttgactggctgaccgagccgctggcctttatccagccgggagaaattttgccctgctgctgccgggcgaaaggcgatattgagatcgagatgtagtcttgtcaggtggcgctacgcttacccgacctactgttccaggaccggccgtttacgcactgccgccctgggctgctgaaactgccggtgttgacggcctcaaaatcgctgagacgttcccggaaggccggggcagcccgcatggatgcgggctgagggccgtgttttgcatggacgctacctcggcccgacccgaagcctgcagggataagtcgaagggaccgcgcagcggcgattttgctggccggagcccgggggtacagggggaggcggcgactggcctccccctgtgcgctccctgcgctatgaaaggcataacgcagaagaaatatcgggagcgcaatcttccaggaaataacatagaacaaacgttattcccgggtcgaaatcgttgcacgccgagaacagtgtcaacaaaaccgcagttcgtacgccgggtaaggcgtagccgccacccggctttttagcgtttcgcgtccaggaactgcaccgctttatccgggaaatcggtaaataagccgtcgacgcccgcctggttatacagcacgtcatagagctgattaacgttagtcgcgtactccggcaactgatccgcgcgcacggtgtacggatgcacctgcagatggctggcatgcgcctctttcaccatcgccgtcagcttcaccgcccccggcttcgagccttccgctaccagcatatggtaatccgggccgataccgtccgcgtactgcgcaatctgcgccatcgcccctggcttgaacatccagtcatagctgtagttcacccacttaccatcggcctgtttctgctgggtttcattccagtcggtataggcgatgagctgcaccagattgagatccatccccatcttcggctccagctcatttttaatgcgtttgagctcgttggcgtcaaagcactgcagataaaccttatcctgcttgctggtatagccatattccttcagcaccttcaatgtgctggcggcaatatctttgccttcctggtggtggaaccacggcgctttgatttccgggtagataccgatgtttttgccggttgaatggttcagcccctggacaaactcaatctcctcttcaaaggtatgaatacggaaatcggatttgcccatcgggaatcgcccgggataggtttgcacgttcttaccatttttcggctcaaaaccttcggtgaacttcagcgacttaatctcgtccagggtaaagtcgatggcgtagaaacggccatctttacgcgcccgctgcgggaaacgctgcgcaacgtcagtcacccgatcgagatagtggtcgtgtaacaccaccagccggtcgtctttggtcatcaccaggtcttgctcaaggtaatccgccccctgagcgtaagccatcgctttcgccggcagggtatgttccggcagatacccgctggcgccgcggtgggcgatgaccattttatcagccgctgtcgcgctgaagcacagcgccgaactggacagaatcattccgctcatcagcgcggtaagtttcattttcatcgccgctccttaggcttgtttcagctgttggtgatggcgacgttcaccgagcatcacgataaccagcaggataaccgccagcacgctgccgccgatcatcaccataaagccgccgtcccagccgaagaaatcgacggtgtagccgacgatagcgctcgcggccacggaaccgccaagatagccgaacaggccggtgaagcccgcggcggtcccggcggcttttttcggcgccagctcgagggcatgcagaccaatcagcatcaccgggccgtagatcaggaagccaatgatgatcatacaggccatatcgacgcccggattacccggcgggttcagccagtaaacgacagtggcgatggtcaccagggtcataaagaacacgccggtggcgccgcggttgcctttaaacactttgtccgacatccagccgcacagcagcgtgcccgggatccccgcgtactcgtacaggaaataggcccaggaggatttatccagcgcgaagtgtttaacttctttcaggtaggtcggcgaccagtcgagaatgccgtagcgcagcagataaacgaagacgttagcgatagcgatgtaccacagcagcttgttcggcagaatgtactgcataaagatctgcttcgccgtcagctcttcttcgtgcttttcgctgtaatcgtccgggtagtcgtttttatattcttcaatcggcggcagaccgcaggactgcggggtgtcgcgcatcatcgcaaaggcgaaaatcgccagcagaatggcgccgaatgccggcatatacagcgccgcgtgccagtcgttaaaccacgccatccctaacaggaacagcagcggcggaatgccgccgccgacgttatgcgcgcagttccacaccgagacaatcccgccgcgctctttctgcgaccaccagtgcaccatggtccggccgcacggcggccagcccatcccctggaaccagccgcagaggaacagcagcacgaacattatcatgatgctggacgtcgcccacggcacgaagcccatcaccagcatcaccagcgcggcgaggatcaagccagccggcaggaaaatgcgcggattcgagcggtcagagaccgatcccatgatgaatttcgaaaatccataggcgatggagataccggaaagggcgaagccgaggtcgccacgagagaacccctgctcgataagataaggcatcgccagggcaaagttcttacgaaccaaatagtaggcggcataaccaaaaaagatgccaataaaaatctgccagcgtaatcggcgatatagcggatcaatctccgctgctggcaaacgcgctttatgcgcggcgggtttaaaaatacttaacatatcagcctccgtggcccttgctgttttctactgaagtcacgacaaaatcccagattaatcaccaacttcaaatatggtcgcgatggtaggcaatacgtagagttgatactgtgaaacatcgcacaatttgttacagaaatatgacaaaacgttccaatgtgagcacgaaatcacataacacgctcaaataacgcgcgaatatgctcgaaatcaaacaataaccttactaattgtggctaaatggcgttaaacgaaagcagaggagctgaagatgacgggacgtcttgatagcgaggtcattatcatcggcggcggagcaaccggcgccggtatcgcccgcgactgcgcccggcgcggattacgaacgctgctcattgagcgccatgatatcgccaccggggcgaccggccggaatcagggactgctgcacagcggcgcccgctacgcggtgaccgacaacgaatccgcccgcgaatgcatcagtgagaaccgcatcctgcgccgcatcgcccgccactgtattgaaccgaccaatgggctgtttatcaccctgcctgaagatgacctggcatggcagcaaacctttatcgacgcctgtcagcaggctggcatagaggccacgccgctctcgccgcaggaagcgctgcgccgggagcccgccgtcaacccgacgctgctgggcgcggtgcaggtcccggacggtaccatcgacccgtttcgcctcaccgcggccaatatgctcgacgcccgcgaacacggcgcgcagatccttaccggctgcgaagtaacaggcctgctgcgccggggcgatcgcgtctgcggcgtccaggtatacgaccgccaacttcaccaggcccgcactctgtacgccgggatggtggttaacgccgccgggatctggggacagcgtattgcggaatatgccgacctgcgcatcaccatgttcccggcgaagggatcgctgctgatcctcgatcatcggattaacaacctggtgatcaaccgctgccgtaagccggccgacgccgatattctggtgcccggcgataccatctcgctgatcggcactacctcaatgcatattccttatgacgaaattgacgacaaccgggtaacagcggcggaggtcgataccctgctgcgcgaaggggaaaagctggcgccggtcatgggccgcacccggatcctccgcgcctactccggcgtccgcccgctggtggccagcgataacgatcccagcgggcgcggcgtcagccgcggcatcgtcctgctcgaccatgcccagcgtgacggtatggaaggcttcattactatcaccggcggcaagctgatgacctatcgcctgatggccgagtgggccaccgacgccgtctgtcgtaagctgggaaacaccaccccctgtaccacggccgaagccccgctgcccggttcacaggagccaacggaaagtaccctgcaaaagattatctccctccccaccccgctgcgcggctcggccgtctaccgtcacggcgatcgcaccccgtcctggcttggcgacagccgccagcaccgtagcctggtctgcgaatgtgaagccgtcactgccggtgaagtgaaatacgcggtggaaaacctggcggtcaacaccctgctcgacctgcgccgccgcacccggattggcatggggacctgtcagggggaactctgcgcctgccgcgctgccggactgctgcagcgctttaacgtcaccacgcccgcgcagtcgttaacccagctctcggaatttctcaatgaacgctggaagggcgtgcagcccatcgcctggggcgatgcgctgcgcgaaagcgaattcacccgctgggtctacctcggcctgtgcggattgccacaggagcaccgggatgaagtttgattgcgcgattatcggcggcgggctcgccggcctgctgtgcgggctggccctgaatcagcacggcctgcgcagcgtcatcatcagccgcgggcagagcgcgctgcatttttcctccgcgtcgttagacctgctctcggcgctgcccaacggcgatcacgtcactgacgtcgcacaaggtctgcagcagctcgctgaacagcttcctgaacacccttattcccggctcggcgccgaggcggtactcaaatacgcgacacagaccgaagccctgctggccgcctgcggcgcggtgatgcagggcgatgcgcgccggccgcaccggcgggtaacgccgctggggacgttgcgcccggcatggctgtcgccccttgaggtgcctgtcgcgcccctgccgtcgcagggcgcctgtctggtggggatcagcggctttgctgattttcagccgcatctcgccgccgccgcgctcggtcaacacggagttaccgccgcggcggtggaaatcgagttaccgctgctggatgtgctgcgtgacaacccgaccgagtttcgcgccgccaatatcgcccgcgtcctggatgatgagaatatgtggccggccctgcatgcagcgctgctaccgctggcgcagcagtatgacctgctgatcatgcccgcctgttttggcctcgccgacgatcgcctgtaccactggctgcaggcgcgtctaccctgcccgctgcgtctgctgccgacgctgccgccttcggttcccgggatgcgtttgcattctcagctgcaacgccagttcattcgcgagggcggcgcctggctcgcaggcgatgaggtggtgaaaatcagccatcgacaggacgccgtcgaggcggtctggacgcgaaatcacggcgatattgcgctgcgtccgcgctttaccgtgctggccagcggcagctttttcagcaacggtcttgtcgccactcgcgatagcgtgcgcgagccgatcctcggcctcgaccttcaccagaccctgccacgggaaagctggtaccagcgcgatttcttcgcctcacaaccgtggcagcgcttcggcgtgaaaaccgatgccctgctgcgccccctgctgggcgggcagccgttccataatctgttcgccatcggctcattgctcggcgggttcgatgccattcagctcggctgtggcggcggcgtctgcgccgttaccgcgctgcacgccgccagacagatccacgcccttgccggaggccggccatgaacgatacccgttttgaaagctgcattaagtgcacggtctgtaccaccacctgcccggtaagtcgggtcaatccgcgctatcccggcccgaaacaagcggggccggacggcgaacgcctgcgtctgaaggatggcgcgctgtacgacgaggcgctgaagtactgcattaactgcaagcgctgcgaggtcgcctgcccgtcggatgtgaaaattggcgatatcattcaacgcgcccgggcacagtacggccagcaaaagccgaccctgcgcgacgccatcctcagccataccgacctgatgggtaccctttccaccccctttgcccccctggtcaacgccgccaccggcttaaaaccggtgcgccgtctgctcgacgcgacgctcaacatcgatcaccggcgtacgctgccgaaatatggtttcggcaccttccgccgcgcttaccgccagctcgccgcccgtcagaagcagtacagcgaacaggtggctttctttcatggctgctacgtcaactataaccatccacagttgggtaaagatctgattcgcgtcgtcaacgcgctgggtaccggggtgcagttgttatcaaaagaaaaatgctgcggcgtaccgctgatcgccaacggttttttcgacaaggcgcgtaagcaggcgcagagcaacgtcgccgcgatgcgggaaaacacgctaccgatcattgccacctcctcgacctgcgcctttacgctacgtgatgaatacccccatctcctcgatgtcgataacagcgatcttcgcgatcgcgtcgagcttgccacccgctggatctggaaacagctggctgccggcaggacgctaccgctgcgcccgctgccgctgaaagtggtctatcacaccccgtgtcatatggaaaagatgggctggtcgctgtataccctcgagctgctgcggctgatccccggcctgcagctggaggtgctggattcccagtgctgcggcatcgcaggcacctacgggtttaaaactgagaattacgcggtatcccaggctatcggcgccccgctgttccgtcagattgaggagagcggggccgacctcgtcgtcaccgactgcgagacctgcaaatggcagattgagatgtccaccagcaaacgctgcgagcatccgctgacggtgctggcgcaggcgctcgtctgagcccagcgccagcctgtgccgtcaatagctcgttttctcttgcggctgggcgctgtcagatttaaacatcgccagccggcggtccagcgcctgggtatacagcatggtatccaccccgacggcgacaaagttggccccccaggcaagacatttttccgccatcgccgggtcgaccgccagaaatccggccgctttccccgccgcgcgaatgcgccggatgctctgctcgatcacccgctgcacgtcagggtgaccggcatcgtccgggtagcccagcgaggcggagagatccgccggaccgatgaacaccccgtcaatgccgtccacctcgagaatagcgtccaggttctccagcgcggttcggctctcgacctgaatcagcagacagagttcgtcattcgcctccgccatataattctccacccttccccagcgcgccgctctcgccacgccggcgccaacgccgcggctcccgatggggggataacgggtcgctgagaccacttcccgagcctgctcggcggtatcgaccatcggcaccagcaaggttctggcgccaatatccagcacctgttttatcaggctgcggttgccctcgaccgggcgaatgaccggctggctggcatagggggcaatcgcctgcagctgatgataaagatcctgaatggtgttcggggcatgctcgccgtcgatcagcagccagtcgtatcccgacgtcgcagcgatctccgccatgtaggatgaggtggagctcagccacaggccgatttgcgtctcaccgcgtaataatccccgtttgaaggggttagataacagtgcgttcatagcgattcctttattcaatgctgtacgctgccgcgctggggtaccgcgcgggtaaggctcaatgaaaagataatgaccaccccgacaatggcgacgccggccagggttaacagtccggcggcgctgctggcgaacaacgtttcggcctgcacgcgcacgatcggcgccagaaaaccaccgatggcgccaaacaggttaacaaagccaatccctgcggccagcgccgtgccggacagcagctgcgtcggcatcgtccagaagaccggctgcacggcgatcaccccgaccgccgccacgcacagcgcgatgatagccagcaccggcgccaccagtccggacactgcaatcccgaccgccgccgccagcagcgtcagggcggcaatattgcgtcgctcgccggtgcgatcggagtagcgagggataagccaggtgccaaacagcgccgccacccacgggatggccgtcaccaccgaggcaacgaagccgactttggtgcccagcagcgcagcaacctgggtgggcaggaagaaaatcagaccatagaccgccacctgaatggtcagataaatcagcgccagctgccagacccgcccgttacgcagcgcatcggacaggcgcgaggcaatctttttctcctcctcgcgcgccagctcgcttatcagcgcctgtttctccgctgcgctcaggaagcgggcatgctgcggcgaatcgtccagccagaagaaggtgaacgctcccgcggcgacggcgagcaggccttcaatgacaaacatccagaaccagccgggatggcccataaatccatgcatctccagcagcgcaccggataaaggcgatcccagcgtcagggccagcggcgcgcccatataaaacagccccataatgctggcgcggttttgctggggaaaccactgtgaagtgaggtagatcattccgggaaagaagcccgcctccgccgcgcccagcagggtacgtaccagcaggaatttcgcttccgtatccgcccacgccatcgccgccgacagcacgccccacagcagcgtggtgcagccgatccatcgcctggcgccaaatttgcgcatcagcagattggccggcaccccgaggaaggcatagaccacaaagaagataccggcccccagcgcgtaggcctcattgctgagtccggtatccagctggtaggtctctttggcgaaaccgatattagaacggtcaagaaacgccagcacgtacagcgccagcataaaggggattaagcgggcgcggtttttcttcaccacgctctccagcagagtgttgctcatcataatatcctcaggcgcgggccgccgggcggcccgacgcaatcagtgttgataaggacgcttcaggttgcagtcgcgattgagctcgacgccaaagccgggtttatccaggaccgatttatgaatgcgccctctctccggcaccggctcgccgagcaggatcgggtcgaactgcgggcgcagcgtggcgcagtccggactggtcatcagaaactcactgaacggcgtgttggtgaaggtgatcaccgcatgatgtgagtaaaccgacgagccgtggggcactaccagctgcccgcgcgctttggcgatggccgcgatctctaccagggtggttaagccgccgcaccagccgacgtcgggctgcataatatcgatgccggtttccgacagggtgcggaaggactgcagcgtgccgtggtgctcgccgctggtcaccatcatcccggcaggcgcctggcgcttcagctcgcgatagccttcatactgctgcggcggcaggcactcttcgatccacttgaggttataaggggcgcaggcatgggcaagtttggtggcatagttaacgtcctggctcatccagcagtccagcattaaccagaaatccgggccgcatttttcgcgcatatccgccaccatggcgacgtctttgcggatcccggcgtcgccatcgtgcggcccccagtgggtaggcattttgccgccgataaagcccatctcctgcgccaggtccggacgtgcgccggtggcatagaactggatttcgtcgcgcaccgccccacccaacagtttgtagaccggcaggccaaccactttcccgaagaggtcccacagcgccaggtcgacacaggagatggtattcatcaccaggccgccggatcccgcgtagtaaagggtggcgttaagcatctggtcatggatcagtttgatatcgctgacgcatttgccttcgataaagcggttgagatgtttttcgacgataaagcagcccatctccccggccgtcgacaccgcaaagccggtctgtccgttgtcggcttccacttccacaatcagcgtccccagcacattgataccaaacgactgccgggactgctcatactgtttatatttgctcatcggggtggcgatatgatcgtcaatccagtggttagccccctggtcatggtaatcgccgccgccggcgccctgctctgctgtggcgccgccgatgaaccaggcgcggacgtgtttaattttcggtagggtcatgatgttctccttatgatgaggcgagttgttcgaaggggcttttccaccccagcagacgtgaaatatctttcgcgcaggcaatcgccttaccagccaggtaatcgcgattgtcttcattgatttgcagacgggtacccaccaccgagatggcggcggtcaggtcgttattggcgttaaataccggggcagccacgcagcgcacatccggatagtcctcgccattatcaaagctccagccccgggcgcggatccgccccagctcctcccgcagctgttgagcatcggtgatggtcgttggcgtggcccgctcccactgcaggtcttcgataatcgacgcctgaacgctggcgggctgccaggccagcaaacatttgccgatcccggagcggtaaagcgacaggctcttaccctcatgcgagcgcacgctgatggtggcgggagactcaattttcagaatgtagtaggcgttaccctgatcgataatgcccagatgacaaagcaggccgcactcatccatcagccgggtgaggcgcggccgcgccagctcgcgcaggtccattttgctcagcgcctgcccggccagctccaccagcttggtccacaggcagtagttatcctgattatccatactgatgaagcgctgctttttcagctcgcccagcagcagatacaccgtgcttttcgggatccccagctccgctattatcgtcgccgcgctgcaggggccgatgcggccaattaaattgaggatctcaatcgcgcgggtcagcgccgggactttcgttgattccaacatactggactccaatcctgaatactggaatcagtgttgcgattgtccgggcggtaaagtgtgagcgacatcgcggggcaatcgttttcccgtatactggaccgttcgcagcagaaaattgcgacttaacgcacagaattttttcagaggagtacaacaggttggacgaccgacgccccgaggatacggtgcgccggggggaatgatttacagcgagagggaatccaccacgttaatccagccatgttcgctggccagtggttgaccattcagccagcgacgcagcatgtttaacgccatcatagcgcagacttcctggcgtaccgccaggctgtggcgggtggcgctaaacttcacccgcagcgcgaaggtgccgtccggggtggccagggccacgttaagatgatcgttttcctgaccgctcaccgccagggccaggccggcaaaatggtttatgcgccgctcggccgcccagcgggccgcctgcgccagcgtctcctcctgcgccggaacgacttcgctggccagcagcggcgcgccggcgcgggacagctggagcgccagcaggccgctggtaaactgctcgctgagcgtcaggctcagctgccgctcctgcagacagcgggcgatttgcgcgggtaacccttccgtaccttcgaaaatcaggctgtcgccagccaccttacgcacctccggccacagggccagcatggcgtcgcgctggttggccggtccggttagcttgagttcaatgatcggcatcgacgagcggtaacccatcaccacgcccggaggcagcgtcagcggattaagactttgcgccagctcgctctccgagcggccaaaggtggtcaaacgcaggcataccggcgggtccggcagcgtaaagcgctggcgcaggcgcggtaaaatttcctgctcgaccatcaccttaaattcagaggggaccccgggagtgaaaaacatcaggcagcggttgagctggatggcaaagccacaggccgtaccgaccgggttgttgatcatctcggcgctggccgggatttccgcctgcttacggttgctttccgccatcggcctgccgcgctcggcaaaaaagcgggtcatggtttccagccactccggatgcaaaataagcccctcgcctttcgcagtggcggcggccagcgcgctcaggtcgtcgctggttgggccgaggccgccgttgacgatcagcacatccgcctgttcgctgcgttcgcgcagaatcgccaccagcgcatcgagatcgtcgccaacggtattgcggcgcgttaacggtaaaccctgattaaaaaagaaatccgccagccatgccgcattggtatcaatgatttgaccatgcaacacttcatcgccggtggacagcatttccacattcaacattgctcactccttgcctgccaggtgagaaatactataacgcaaagcgggatgctgacgaggaggaaaatctggcgcagcaagaagatgccgcgccggaagagattagaagctggcgctggcgccgatgtatgggccgtcggcgatggtgttatcgcggttgccatctttgcccgccaggttcaggtaacggtagccggcctggatgctaagcggacgcataatggtccagctggcgccgacgttggcttcctggtagctatcaatgccgctggagagcgaatccggagagtagtaataatcgccgtacaggcggaagctgtcgccgattttccactgtaggccgccgccgaccgcggccgcataaccttcatcgccctgtttcggattggtgtaaatacctttaccacccacggtcgcgaggaacggccccagcggaatattgagtcccaggcctaaacccgcggcgtcgccgtcgttatcgctgtgcagccagttacccgaaacggccaggccggtggactcggtgccgaagccgacgccaaggttggtgtaatgctcgccggcttcaccggtaacgctaatcgcatgggccgccgaagaaaccatcatcacgcccgccagcgccataaaaatgctttttttcattatttactctatccagaaaattaaaatcaaagaagtcccgaaaaaacctgaaaattctactgcgcacccatcaggaatcaatgacctggcgaaatgaattttcacaagagtgtaaccagttgcgtatttttacggcatcgagcgttgccagaaccacgaacagcctattcaacgccagtaatattcatgtttattatgattaacgctgacacattgacgaaaacagagagctggcgccgcacgatcggcgcggcgcgggtggataagggaataattaatgctgcagccgggccagacattccggggcgaggccggtcagtttcgccaccagcgacaggtcgagtccgttagcaagcatcgcccgggcgatacgctccgcggtctgctgctcaccttgctcgataccttgttcgataccttgctgtagaccttgttcaagaccttgctttaatccttgctgatggccgcgttgttccagaaactgggcaatattcattagcgtctccttatgcggccgccggggaacgttttgcgcaagatggcgcaaaaaagcaaccggatcggcggcgtttcctgcctgtaataaatagtgcaacagcgtcttaagctgcctgcggctagtgtatcccagcgccaggagcctgaccagttgctcatgcaggtccatcaaatcccgctggcgaatatgcttctgcagcagctccagcatcgccacgcgccggtggcgcatgatttcatcgtccggggtgctagtgatatcaattaagggaaaatcttcaccatagacccgccgcgcgatgtccggatcggcaaagcctgccagccagcacatcgggtaaggccagggagaaacgcgaccatgataaaacagcagcgggatcaccagcggcagctgcgtatgccctttatccagatgacgctgcatcgcggctatcgcatagcgcatcaggcgaaatgccatatggcggtccgccgagctttggtgctctatcaacagatagatatagccctcccccgcctgcgtttgcagcgagtaaaggatatcggaatgactcgcccgcagttcgtcgtcgataaagctcccggactccagccgcagcgtgttcaggttacataacgcgcgcagcggtgcgggaaggtgaatgtccagaaaatccctggccgtcgcccgatgcgacagcaggtgtttaaatacagcatcgtggggggaattcgtcgccctttccatggcggtgctccatacaatcattttcgcttaacgtagcactcaacaagacctgaactgtatttcgcttgcagtttaccgaggcggctcgcaaactatttcaccagcataccgccccatccctctgcaggagaaaacccatgcgccacaggacgattgtttgcccgctgatcgagaataaaggccattatctgctttgcaaaatggccgccgaccgaggggtttttcccgggcaatgggccttatccggcggcgtggagccaggggaacgtattgaagaggcgctgcggcgggaaatacgcgaagagctcggcgaaaaactcatccttacccatatcgcgccatggtgctttcgcgacgatacccgcgtcaaaacctaccccgacgggcatcaggaaacgatctacatgatctatctcatcttcaactgcgtgagcgccaatcgcgatgtgacgatcaacgaggagtttgacgattacgcctgggtcaaagccgaagatctcaaaaactacgatcttaatgccgccacccgcgttactctcagcctgaaagggctactttagtccagcataccgcgttcaacccacccggcgttatgccgcgggataatgcgggtggctacgatacggtcgcatgcgtctgctgcctgacccactcgcacagcgcccggcgcgaaatcttaatcccgccgttttttaacgtttccggcaaccgcagccaacgcaccggctgctgaaaacgcgctaaccgctcagcgctccatgccgccagcgcgctcaactcgcagccgtcatcgcattccaccaccgctaccgggcgctggccgtattccgcatcatccagcggcacgataaacacctgctgtacctgtggatgggcgagtatcacacgctcgacctcttccggttgaataccttctccaccgctaaaaaagaggttatccagtcgcccaacaaccgtcagccgaccgttatgcaatgctccgcgatcgcgcgtcgcaaaccagccttcattgttggttaatgacaacaattgaccatcccgccagtagcctgcggccatactcgacgcccgcagccagatctcgccggcgacaattttcacctctcgccccggcagcgcttcgccaacatccgcagcgccgtcggcctctttggcacacacggtggaggcgaattcggtgaggccatagccgcagaagctgcgtatgccctgctttcgcgcccgttcagtcaattcgaccgggatcgacgcgccgccgagcagcaccgccttgagggaaaccgcagcatcatcattcagcaggcgccatagctgagtcggcaccagcgaagcatgggtacagccgtgcagcatctgcgccagcggctgtttgtcacgtaccgtgagtcgcgcgccggccagcagccagcgccagacgatcccctgaccggagacatggaacaacggcagcgacagcagccagtcatctcctgcggcaaacggcatcagcgccagcacgccagccgcgctggccagatgggcgttggcgctatgtaccgccgctttcggcaggccggttgaaccggaggtcaacgtcatcgacaccaaccgatcgccatgccaacaaacggcacaagcgccttctgccgcctgcagagttaacgccggtaaattccccggcagcgtatcaccgttaagcaccagttgatgctgtacggttaacgcaggcagcagttcctgcagcaacaccgctggcagctgcggattcagcggcagcacccgcgccccgcactgtagcagcgccagccatgccagcagagtttccggctggttataggcccggagcgccacgccctgcccttccattacgccctgcgcggcaaaaccagacgccagcgcgtcaacccgcgcgcatagctcccgccaggtcagcggctggttattcagacgtaaggcgagggcctctccgcgccgctgacgccaatgccgccagggccagtcgttaaaggtcacagcagcggctccagcgcatcaatgttgagcaccggcagcgcactttcgggccacggccgtaccagctgggcgcccatcagcgacagcgtatccagcccaggaatagtctgcggcgtcagccaggcggcaatccgcgccagctgggtcaagccgaggctggactcgatcgacgagctgatcactacgctcaaccccagcgcatgcgccgcggcgacctgttgctgcaccttctgcaaactgccggttagcgtcggtttgatcaccaccgcacgtacgcccggctcggcgacaaagcggaaatccgcctcgcgcaggctttcatcccaggcgatagcgatccctgtctcgcggctaaaggcccgagaatcctcccgcgttttgcaaggttcttcaagaaaagcaatgcgctggcggtacgccggattaacgtatttggcgaactgttgcgctttgagcggcgtccaggcgcggttggcatcgagccgcagctgcaggtcggggatcgcctccagcagcagattgaccaccataccgtcgcggaccgcctcccagaggccaactttgaccttagcgaccttctcgccgggcatcgccgccagtctggcgaatagctcatccggatcgccggagcagagcggcgccgcgcgataatccgcggcctgcggtagttcgccgccaagctccgcctgcgcgcagctgatgccaaacgcgacggagggctgcgtgggaagcggcggctcggcgccgtcgcgccaggcctgtgcccacgctaacagcgccatttgcgcctcttccagcgtctcgacactgaatcccggcaggggagaaatttcgccccagccttcgcgttcaccctcctgcaggcggatgaacagcccgtcgcgggtttttaaccgccgctcgcgcagcaccacgcccgcgtccatcggtatctgccagcggtaaacctgcgaaacgcgcattatggattccgtttaaatttgctgaagtccggctgacgtttctggttgaaggcattgcggccttcctgcccctcttccgtcatatagaacagcatggtggcgttgcccgccagctcctgcagaccagcctggccgtcgcagtcggcgttcagcgccgctttcaggcagcgcaaggccatcgggctgttctgcagcatttcacgacaccagcgcacggtctctttttccagatccgccagcggtaccacggtattcaccagccccatgtccagcgcctgctgagcgtcatactggcggcacaggaaccagatttcgcgcgcttttttctgcccaacgatccgcgccatataggaggcgccccagccgccgtcgaaagagccgacttttggcccggtctggccgaagatggcgttttccgccgcgatagtcagatcgcacatcatatgcagcacgtgaccgccgccgatagagtagccggccaccatcgcgaccaccggtttcgggcaggtgcggatctgacgctggaagtcgagcacgttaagatgatgaacgccggagtcgtcctgatagccgccgtagtcgccgcggactttctggtcgccgccggcgcagaaggctttctcaccttcaccggtcagcacgatgacgccgatattgtcgtcatagcgggcatccgccagcgcctggatcatctctttgacggtcagcgggcggaaggcgttgcgcacctgcggacgattaatggtgattttggcaatcccgtcagtcgatttgtgatagcgaatatcggtatagccttcggagcaatcgtgccattcaacgggggcgtagagcattgcttcatcaagagagatcatagaatgtccttcagttaacttgccagaatctgcgccagacaggcaatcaccgccgccgggttgtcccggtgcgcgttgtgtccggcatggtgaataagatggagatccgccgcgagcgtctgcgcgatggcgcgaaacttcgcgtcgcgctcgccgcacaggtagtgaaaaggaaaatcgcgcgcctgcagagacgcgcgcagatcggcctgcgcggcaagggaggttgcctgcagcatcgccgccagcgtcgcgccgttgttccggctgcgtaaggcgaccaatgactcacgctgcgcggcattcagcgaagcgaagaccggctgctgataccagtcggcaaagacctgctcaagcggctcgcggcgaaaacgttccgcccaggcgctgtcattgctgcgccgcgcctgccgcgcctctgcatcctgcaggcccggatggccgccttcaacgatcagcccgcgcatgcctgcgcgcggctggctggcgaagttcattgccacccggccgcccagagagtagccgatcagccaatacttatgtatgttgtaactattaagcgtagactgcagcagagtattgaccccggcaaagtcctgcaccgcgatatccgcggagccgccgtgccccggcagatcgaggtacagccgcggccaggcgggaaaggcgtcgcccactttccgccactcgttgcggtcgccggaaaaaccgtgcagaaacaccagccagggatagcccggctggccgttgtcgacagcagcgctgaggatcacaggcgacttacctgcgccagcagctgctggagggtctgcgcgccgtcggtctcattgaccgccagctcaatcaccgtcgcccccgccctgcgccaggcgccggccagcgcctcatccagcgacggccagtcatcagggcgatgataggccaggccgaacatcaccgccgcgtggctgaaatccacgtcctgcggcattaaatagaactgacggcgttcgtcctgcggcgtcggcagcatagaaaaaatctgcccgccgttgttattcaccacgatcagcaccagcggcgccgacgcctggcgcagcagggccagcgagttgagatcgtagagcgcggagagatcgccaacgatggccagcgtcggtcgggcgctggcgcgctgcacgccggccgcagtggcgatcaggccatcgatgccgctggcgccgcggttgctgtagaccggatacccagccggtagctgcgccagggcgtcgatcaggcgcaccaccaggctgttgccaacaaacaattggccctgctccggcagatagcgccgaatacgctgcgccagctgcgcttcgccaaaaggctcgttgctggcgaccgcagcctgccacgcctgcccggcaagctgtgggatcaccgtcgcccacggctggcgtttctccgccggatgtaattcgagccagcgctcaacgcttgagagcagacggcgaccgcagtgctgcgccgggtcgaggcgaccgggcagattatccaccagccagtattcatccggctcgcaggtcgcctgccactggagcacgcgtttgccggtcaggctgctgccgagttgcacgacgatctgcgcctgcgccagctcgctgaccgctttgccgttgcccagccacaggtcggcgcacggcagcggctgcccggtctgcgacaggacatcgccgatcagcggccagccgagggtctgcgcccactcagcgacctttttcccttccgcggcactcattctgcccgccacgacgacgccgcgtttttgtcgccagaagaaccagtcgcgctgcttctcgctctctaactgcagcgcctggcgcagccagggtttgtcgctctgccaccagttgccgagctgctgctgccactccacgccggtctcatccatatcaccatacagcggttcagcgaacggacagttaatatgcaccccgccggcgtgcagcgcccccagcgcctggtcgatggttgagaccagccagcgggcaggaatatcctgcgagggacgcggcaaagaaatcgtctgcgcaggatgggaggcaaacatccccggctggcggatagcctggttcgcgccgcagtcgatcagctccggcggacggtcggcggttaacaggatcagcttttcaccggtgagccctgcctcaatcagcgccggatagaggtttgcggtggcggtcccggaggtgactatcaccgccaccggctgccggctggccttcgccagtccgagcgccaggtggccgaggccgcgttcgtcgaaatgggtatgatggataaaggcgcggttttccgccgccgccagggttaagggtgtcgagcgcgagcccggcgcgatgcagatatgctgcacgccatggcgcgttaaagcttccaggatcaccgccgcccagcgtcggttaaatgcgcttactgacatgaaattgtccggtatcaaatattgatgctaagtatagataaggcaaagtgacgtcgttttgatatgcatcgtcattcaagctttatggacacagcagcgagcgcagcccggccgctttgttgtcaatctcctgccactcctgctgtgcatcagagccgctgacgatccccgccccggcatacagccgcagggtgtcgtggtccactttcgccgaacgcagcgccacgcaaaactcgctttgcgccagtgacagatacccggcggacccggcgtaccattcgcgggaaaacggttcatgacgctgaatgaacgccagcgccgcccggcgcggcaggccggccaccgcggcggtgggctgcagctgcagcagacagcggctgtcgtcaggcgccgccagctcggtccagatgcagcgtcggagatgctgcaccttacgcagcctcaccacctgcggcggcaggacgtccagcgtcgaggcctcactctgcaggcgctggcagatatcctctaccaccagcatgttttcccgctggtttttgtcgtctttcatcaaccagtcggccagttgctgcgccttcgcgtcttcctgatggttcgcgacggtccccgccagcgcttcggtgcgcagcagcgcgccgcgccggcgccacagccgttccggcgtggagccgaaaaatgcctgccgggcattgaacgccatcaggaaatgaaaacagttaagattgctgcgccggctagccgccatgatgctcacggcgtccagcggggcggcaaactgcaggtcggttgcccgcgccagcactactttatccatttcaccggcgctgatcgccttagtcgcccgcgcaatcattgcctgccattgaggatagtcggatgagtggcgctcgctcagcaacggcggtatggcgccgggagtcgcctgagtggttgtcaggctggcgagaaacgcgcgggccgtcgcggcatcctcacgcagggagatatcactatgcagcaccagccgcagcacggccctgccgccgcaccggcgccactccagacgcggcagcgccaggctgccctgctgcggttcaaacgcattcaggccgcagatacgcagatcctgccggccggcctggcgtaaaaagcggttcgccgcgtcgagcgaggtaaaggtttttaccgcccccagcgtcgccagttcctcatcgccattgcgctgctgccagtaaaactgcggccattgcgcctgctggccgcaccatagtagcggatcgaaggcatcattcagcggaaaggcaacatcgataattcgcgtgccgggcgagtctggaaaagactcgcccaggccgtcttgcaaacgggccagcgcagtggaaacagacagcacgcaaacctccacggttgtaaaaccccacattataaggggttcgacggcggaatagcagtacccatgatgagggagcgggttttatcttacccgctcgccgggccagagctgcgtgtggacgagggtgcagaggagtcagacagcgcgcttttctcgcgccatgccaatgtgggggatgccatcctcatcatagacctcggtcaccggcgtaaaaccaaagtgggcgtaaaaggattgcaggtgcgcctgcgccccgaggtaaatcgccttttgcggccagtgctgctgacagctggccagcgcctgctccatcagctgatagccgagcttcgcaccgcgggcggcggggctgacgatgacccggccaatcaccaccggcgcaaactcctcttcgcttttgaggatccgcgcgtaggccaccagttcgccatcgcgccagccgagcagatggcgattttcaccaaccaaatcatcgccgtcgacatcctgatagacgcactgctgctctacgacaaagacttcactgcgcaatttcagcagcgcatacagctggggaacggtgagttcactatggtggagatcctgccaggtcatcatctgctgctccttattgatatactgatactttgcgactcgccctgaggacactggacgatggaattaacttttttggggacatccgccggggtgccgacccgcacgcgtaatatgacgtcgataatactgaatttgcaacagccgacccgcgccgaaatgtggttgtttgactgcggcgaagggacccagcatcagtttcttcacacgccctaccatcccggcaaactgaataagatttttattacccatctgcacggcgaccacctgttcggcctgcccggcctgctgtgcagccgctcgatgcagggaaactcccttcccctcaccctctacgggccaaaaggactcaaagagtttgttgagaccgcgctgcgcctgagcggttcgtggaccgactatccgctcaccatcatcgaagtcggccctggtctggtgttcgacgaagagggctatcgggtcaccgcgtatccgctcagccatccggtggagtgctatgggtatcgcattgcgcagcatgacaagcccggcaccctcgacgccgcccagctgattgccgatggcgtgcctcccgggccgctgttccatcaactcaagcgcggacagcgcgtcgagctggcagatggccgggtcattgacggcagccgctatctggggccatcgacgccgggtaaaacgctggccatcttcggcgataccgccccctgcccgcaggcgctggagatggctcgcggggcggatgtaatggtccacgaaaccacccttgagcaggcgatggcggagaaagccaatagccgcggccactcttccagtcagcagaccgcggcgcttgccaaagaagcgggggtcggtacgctgatcgccacccactttagctcgcgctacgatgccgaaggctgtctgcgtatgctggcggaatgccgggagattttccctaacacgctgctggcggaagactttatggtctacaagatggcgtaaaatccgggcataaaaaaaccgccatcccggcggttttttattgagtcaatcaacttacatcagcggcgtcgccagctgcacgatgctaatcagcggctgcggccagataccgagcaccagcaccagcagcgcggagatcagcaccacgataccgccggcgctgtactgccagtttgacggcgcatcgcgattcagttgctccggcgcgctcaggtacaggctcactgccacgcgcaggtagtagtagagaccgatcgccgagccgacaaccaccgcggcaaccagccaccacagatgcgcatgcacaccgacggccagcacgtagaacttaccgataaagccgagggtcatcgggatgccggccagggagagcatcatcaccgtcatcacagccgacaggatcggacggtgccagaacaggccgcggtaggagaacagcgagtcagcatccgggccgcggtacgggctggacatcaggctgaccacgccgaacgcgccgaggctgctgaacaggtaaccggccaggtagacgcccacggcttccatcgacatttcaccgctctgcagggcaatcagcgccaccagcagatagccgagatgggagatggaagagtaaccgagcaggcgcttaatgttggtctggctcagcgccatcaggttaccgaagatgatagaggcgaaggcgatcaggcccagcaccacgcgtaccgcttcgctgttgcccaccggcatgtacaggaacagacgcatcactacgccgaagatagcgatcttgctggcggtcgccaggaaggtggagaccggcgcaggcgccccctggtaaacgtccggcgtccacaggtggaacggcaccagcgacagtttaaagccaagaccgacaatcatcaggccaagacccgccagcagcagcggctcgtgcagcatgttgtccgccaggcttttgcccagcgcgaggaaggacaggttgccggagttcgcatacaccagcgccataccgaacagcaggaaggacgaagctgccgcggagaggatggtgtatttgatgctcgcttccagcgaacgcttctggcggaaggcataaccaaccaggccgaacagcggcagcgaaatcagctcaataccgaggaacagcgccgccagatgattcgcaccggccagcagaatgccgcccagggcggcgatcagcaccagcaggtagaactcttctttgttgtccttgtaaccctcaagccacgggtaggcgaaagtacaggtcgcgaggctcgccagcagcaccagaccggtgtaaagcatggcgtagccgtcaacgcggatcagcggcgtgacgtccatcgccccgttctggccgacgaaccagagcgagaccagcgcggcgttaagtccaagaaccgacagcgtggcattgagaaaatgattgcgtcgccacgcaatggagagcatcacaaccaccaccgtcaagccgacgatcagcagcggtagcagtgcgatcagttgttgtggagttattgtcatggcgaattacggccttgtagtagaaacagaattaacaaaccactgctgaatgttgctcatcgcagcatgcgaggtgtcgaggatcggctgcgggaagaagcccaacagcaccagcagcaccaccagcagcaggatgatagacagttcacgcagggacatccccggcaactctttcgccgccacttcgctcttcgctttaccgaagtaagcgcgatgtaacatcgacagcgagtaaacggacgcgaataccagaccaaaggtggagatgacggtgatcgtcggcaccactttatagctgccgaacaggatcataaattcgccgacgaagttaccggtgcccggcatccccagggtggcgaccgcgaagaacatcgacatcgccggcagccatttaattttgctccacaagccgcccatctggcgcatatcgcgggtgtgcagacgttcgtacagctggccgcacagaatgaacagacccgccgcggacagaccgtgagcaatcatctggatcaccgctccctgataggccagctggctgccggtgtagatagcaatcagcacgaagcccatgtgggacacggaggtgtaggcgatcaggcgtttaatatcggtctgggcgaaggccatccacgcgccgtagaagataccgatcacgcccagccacatggcgatgggcgcaaactcggcggaggcattcgggaacagcggcagcgcaaagcgcagcaggccgtaggcggcggttttcagcaggatccccgcgaggtcgacagagccggcggtcggcgcctgggagtgagcgtccggcagccagccgtgcagcggcaccaccggcattttcaccgcgaaggcgatgaagaagccgagcatcagcaggtattccacgccgtgagacatcggggttttcagcagatcttcatagttgaaggtccacacgccggtggcgttgaagtggacgaaggccagcgccagaatggcaatcagcatcaccagaccgctcgcctgggtatagatgaagaacttggtagccgctgtgatacgcgttttaccgtccgaggctttgtggccccacagcgcgatcaggaagtacatcggcaccaacatcatttcccagaagaagaagaacaggaacatgtcgatggcgaggaacacgccgataacgccgcccaggatccacatcaggttgaggtggaagaagccctggtatttttcgatttcacgccacgaacagagcaccgccagcacgccgaggagaccggtcagcaccaccatcagcagcgacaggccgtcgatcgccagatggatgctaatgccgaagcgtgggatccacggcagcacgaattccgactgccattgcggaatacccgcggattgcgtcagagaatagccgccctgcatccacagctgcaggccaagcaccagcgtcagtcccatggtaatcagcgcgatccagcgcggcactttcacgccaaagcgttcggtctgccagcacaggaagccgccgataaagggaattaatattagccagggtagtaacatggcgatttttattccttgttaaagtcccgttcaggaccgattttcaacgaattcgactacattcacgtttgagtgcggtttgttgtgtcgggtggcgcttcgcttacccgacctacggtctcgtaggcccggtaagcgaagcgccaccgggcaaaaccgcgcgatcaaatcaacgcaataccatcagcagcgccagcaccaccaccgcgccgatgctcattgaagccacataccagcgcagataaccgttctcgctcaccagcaggcctttgcctgcgaagcgggaaaggatcgccgggatattcatcaacgagttcagcggatcgcgtttcagcagccaggcaataccgaggaatggttttacgaacaccttgtcgtataaccagtcgaagccccaggcatggaaccaccaggtaccgaagaagcggccaggcgcactgttggcgatggaggtcaccagcgtgcgtttgcccagccacagccatgcagcgatcagaatcccggcaatggcgatgatcccggaggcaatctccagcgtcatcacgctaccgtgggcgagctcagtggtctgcggcagtacgccttccagcggcggcacaatcagcgcgccaacgaaggtggatagtaccagcagcacaatcagcggcagatgatgggtaatccccttccctgcgtgcgcgtgaatttgctctttaccgtggaatacgatgaaaatcatccggaaggtgtacagcgaggtcataaaggcgccgaccaggcctgccaccatcagattgatatggccattggccatcgcgcctgccagaatctcatccttactgaagaagcctgcggtgataagcggcagtgcggacagcgccgcgccccccaccaggaagcagacgtataccagcggaatcgatttgcgcaggccgcccatcttgaagatgttctgttcgtgatggcaggccagaatgaccgaaccagacgacaggaacagcagcgctttaaagaacgcgtgagtcatcaggtggaaaatcgccgcgtcccatgcctgcacgcccagcgcgaggaacatgtagccaatctggctcatggtagagtaggcgagaacgcgtttgatatcggtctgcaccagcgcggcgaagcccgccaacaccagggtgaccgccccgacgataccgaccagatgcagcacttccggcgtcatcaggaacaggccgtgggtacgggcgatcagatagacgcccgcggtgaccatggtcgcggcgtggatcagcgcagagaccggcgtcggacccgccatcgcatcggcaagccacgtttgcagcggcagctgggcggatttaccgaccgcgccgccaagcagcatcagcgtcgcccactgcagcgtggtgctgccgttagcgaagtgctgcggcgccagctccaccatttcgcggaagttcagggtacccagttcgttataaagaatgaacagcgcgaaggcgaggaacacgtcgccgacgcgggtcaccacaaacgctttcatcgctgcggcgccgttcttcggatcggtgtagtagaaaccgatcagcaggtaagaacagaggcccacgccttcccaaccgaggtacatcagcagcaggttatcggccagtaccagaaccaccatgctggcgataaacaggttggtataggcgaagaagcgggaatatccctcttcaccgcgcatgtaccaggaggcgaacatgtggatcaggaagccgacgccggtaactacggagagcatggtcagcgacaggccgtccaacaccaggttgaagccgatgttgaaatcaccgaccgacatccaggtccacagcggcacgctgaccgcctgtttgccgttagcgaaaaagtcgacgccaacgtacgcggtgaccagcgccgccaggcctaccgagcccatgccaacggtggcggaaagattttccgaccagcgcccgcgggagaaggccagcagcacaaagccaatcaatggcaaaagaatggttaaggcaagcatgttcatccacgcaactcacttactgaatcgatgttcaggttctggcggcgacgatggagctgcagcagcagcgccaggccgatactcgcttccgcagccgcgaggctgatggcgaggatatacattatctgaccatctgcctgaccccagtagctacccgccaccacaaaggccagcgcggcggcgttaatcatgatttccaggctaatcaacataaacagcagattgcggcggatcaccagccccgtcagaccaagcacaaacaggatggccgcgaggatcagtccatgtgttaaggggatcatgcgtgttcctccgtttttcgtttgtcgctgtcgttcagacggttgctcagcacctcgccggcgcgctcttcgcggccaatgtggaaggcaaccaccaggcccgccagcagcagcatggaggccagctccaccgccaggacgtacggcccaaacagcgcaatgcccacttctttggcgttaatcgccgcaccgtcgataccctggtcgttaatgcccaggatggcgtaaacgataaccaccagcagcaccgcggagaggatggccgggccaatccagatccccggctgcagccacttgcgctcctgttcgatctcggtgccgcccaggttgagcatcatcaccacgaagacgaacagcaccataatggccccggcgtagacgatgatttccagcgctccggcgaagtacgcgcccagcgagaagaacaccccggcaatcgccagcagcgaaataatcaggtacagcagcgcatgcaccggattggtgtgggtgacgacccgcaaggttgcgaggatggctatcaggccacagatataaaaagcgaattccattgcccctctccttacggtaacaggctcttgacgtcgattggcttagcttcattttccgcttcgcccttatctttgccgtcgattgccatacccgccatccggtagaagttatattccgggtatttgcccggaccggaaatcagcagatcctctttttcgtacaccagatcctgacgcttgtattcacccagctcgaagtccggggtcaactggatcgccgtggtcgggcacgcttcttcgcacaggccgcagaagatgcagcgtgagaagttgatgcggaagaactccggataccagcggccgtctaccgtctctgctttctgcagcgagatacagcccaccgggcaggctaccgcacacaggttacaggcgacgcagcgctctgcaccgtccggatcgcgggtcagcacgatgcggccgcgatagcgcggcggcaggtagaccggctcttccggatacatccgggtttcacgtttggcgaaggcatgcaggccaatcatccagatactacggacctgggtgccgaaccccaccaataattcttttaaggtcatgttcaattcaccccttattgcgcctgccagagaatgacagccgccgttaccaacaagttgaccagcgttaacggcaggcataccttccagccaaaggacattacctggtcatagcgcggacgcggtaatgatgcgcggatcaaaatgaacatcatcatgaagaacgcggttttcagcgcgaaccagatgaaaggaggtaaccacgggccattccagccgccgaagaacagcgtgacgatcagcgctgaaacggtgacgataccgatgtattccccgacgaagaacagaccgaatttcatgccggaatattcaatgtggtaaccatcggccagttcctgctccgcttccggctggtcgaacgggtgacggtgacataccgccacgccggcgatggcgaaagtcacgaagccgaagaactgcgggataacgttccacagatgcgcctggttgttaacgatatcggtcatattgaatgaccccgcctgcgccaccacgcccatcagggagagaccgagaaatacttcgtagctcagggtctgcgcggaagcacgcatcgcccccagcagcgagtatttgttattgctcgaccaaccggcgaacagcaccgcgtagaccgccaggcctgccatcatcaggaagaagaggatgccgatgttcaggtcggccaccacccacgtcgggctaaccggcacgatagcgaaggccagcagcagcgaggtaaaggcgataaccggcgccagagtaaagatcacgcgatcggagaagcgcgggatccagtcctctttaaagaacatcttgatcatgtcggcgaccagctgcagcgaaccgccccagccgacgcggttaggtccgtagcggttctggaacaagccgagcagacgacgctcgccgaagctcatgaacgcgccgcaggtgacaaccaccagcagaatgaccacggccttcaggatgcttaacagaatgtcgataagatccggcgttaaccagctcatgctttcgcctcctgcagtgaatcaatacgcgatccggtcagcaccggcgcaatgcccggcatgcccatcggtaagccaacctgtcccgcggtcaggccttcagagataaccagcggcagacgcagggtctggccttccacgctaaaggagagcattgcccctgggttgacgccaagcttcgcggcatccgccgggttcagcttgatgtacggctcaggcatccggctctggaacaccggcgcgcgctgagacagctcatcgctgccgaacagatggtagtacggcgcaattcgccatttgccctcttccgcctggaagctggccggcaccgccgtgaagtactccagtccgctggcggacgcttcaaacagacgaacgcccggatcgccgtggcgcagtttcccgcccacttcatcctggaacttgttccatgcctgcggggagttccagcccggcgcccaggcgaacgggatctgcgaacgcggggcggacggctggttgttcccttccatggagaaggcgaacatcgtgtctttatcctgcggctgacgcggctcgtgcacgctgatgttagcgcgcatcgccgtgcggccgctgtagcggtgcggttcacgcgccagcttctggccgcgaatgcggaaggtcgcatccggcgcggcgtctttaatgcccgccagctgcggcagcgcggcaatcgccgcatcaatgacgtggtccagctgagtccagtcaacctgacggttgttgacggtgctgtgcagcgaatgcagccagcgccagctttccagcattacggttttcgcgtcgtagtaagccggatcgtaaacctggaagaaacgttgggcgcggccttcgttgttcaccacggtaccgtcgctttccgcaaagcttgccgcggagagcaccaggtgcgctttgtccataatcgcggtgcgctgatgatccaccaccatcaccagcggcgctttcgccagcgcagcgtcaacgcgcgcggcggaagcatgacggtgaaggtcgttttccagcacgataaccgcgtctgcggcgccgctttccagttcgtccagcgcctcttcaagcgagccgccgccgatcatgcccagtccgacgctgttaaccgcccgggcgaccatggtcaccccgacatcggcgccgcggcctttcagagctttcgccacgttagcggcggcctggatgatctccatgctgccggcgttggtcccggagatgatcagcggttttttcgccccggccagcgcctgaacgataacgtcgactttaccctgcaggtcctggctcaggccgtcaaccgccggcgcgctgtcgtccagcgcatgggcaatagcaaagccgagacgcgcctgatcttctaccggcgcgcggtaggtccacgccgcgatgtcatccaggcgggtgtcatcgacgttggtgacgaatagcgggtgcttggcgcgctggccgatgttgaggatcgcggcgatctgccagtcggccactttctgcgccgccgccatttcgcgtgctttccctttcactgcctggcgtaccgccagggccacgcgcgcgccggtctgggtaatgtcttcgcccagcaccagtaccgcatcgtaggattcgatatcgcgcaggcttggcgtgtggatcccgccctcgcgcagcactttcagcatcatctgcaggcgcgcttgttcgcctttggcgatgccggtatagaagttgtcggcacccaccagctcgcgcagcgcgaagttgctttcaatgctggcgcgcggggagccgatgccgatcactttcttcgactggcgcaggatatccgccgccccctgcatcgcctgctcggcgttaagggtgatcagatcgtcgccgcggcgctgcaccggctgacgcggacggtctttcaggttcacgtagccatagccgaaacgaccgcggtcgcagaggaagtagcggttcacggtaccgttatagcggttttcgatacgacgcaactcgccatagcgttcgcccgggctgatgttacagccgatggaacactgctggcagatgctcggcgcaaactgcatgtcccacttacggttatagcgctcggagtgggttttgtcggtgaagacgccggttgggcagacttccaccaggttgccggagaactcgctctccagggtgccatcttccgggcggccgaagtagacgttgtcgtgcgcgccatagacgcccagatcggtgccgtcggcataatctttgtagtagcgcacgcagcggtagcaggcgatgcagcggttcatttcgtgcgaaataaacggccccagatcctgattgcggtgggtacgcttggtgaaacgatagcggcggaagctatgaccggtcatcaccgtcatatcctgcaggtggcagttgccgccctcttcgcagaccgggcagtcgtgcgggtggttagtcatcaaccactccaccacgctttcgcggaactgcttcgcttcgctgtcgtcgatagaaataaaggtgccgtcggatgccggagtcatacaggacatcaccaggcgaccacgcgtgtcttccgcgttctgatattgcttcaccgcacactggcggcaagcaccgacgctccctagcgccgggtgccagcaaaagtagggaatatcaagaccaagagagagacaagcctctagcaggttgtccgccccgttgacctcgtattctttgccgtctacatgaatcgtagccatttgcgtgcttccaaaaataaaaaacctttagattaccagcgcgtcttaagcaggttcggctgaatcccgttgattgcatgggtattgctgaactgctgcttaatgccagcctcgaattcttcgcggaaatatttaatcgcgctctgtagcggctcgaccgcgcccggcgcgtgcgcgcagaaggttttacccgggcccaggaatcgacacagttgctcaagggtttcgatatcgccaggctggccttcgccgcgctccagggcgcgcaggatcttcacgctccacggcagaccatcgcggcacggcgtacaccagccgcaggactcgcgggcaaagaactcttcaaggttacgcaccagcgagaccatgttgatctcgtggtcaacggccatcgccagcgaggtgcccagacggctgcccgctttaccaatgctttcgaattccatcggcagatcgaggtgcgcttcggtgaggaagtcggtccctgctccgcccggttgccaggctttaaacttcaggccatcgcgcataccgccggcgtaatcttcgaggatctcgcgggcagtggtgccgaacggcagctcccagacgcccggattcttcacccggccggagaagcccatcagcttggtgccagcatctttgctggtggaaatgttctggtaccactcgacgccgttggcgaggatcgctggcacgttgcacagggtttctacgttgttgacgcaggtcggcttgccccagacgccggagctcgccgggaacggcggcttggatcgcgggttggcgcggcggccttccagagagttgatcagcgccgtctcttcgccgcagatatagcgccctgccccggtgtgcacgaacagctcgaagtcaaacccggtgccgaggatgtttttccccaacagacccgcttcggtggcttcagcaatcgcgcgacgcagatgctgggccgcttcaatatattccccgcgcaggaagatgtagccgcggtacgctttcagcgcaaacgcggagatcagcatgccttccaccagcaggtgcggcagctgctccatcagcaggcggtctttataggtgcccggctccatttcatcggcgttacacagcaggtaacggatgttcatggattcgtctttcggcatcaggctccacttcagaccagtggagaagcccgcgccgccgcgccctttcaggccagcgtcttttaccgccgtgacaatctcatccggggccatcccggtcagggctttacgcgccccttcatagccatttttactgcgatactcgtccagccacaccggctgcttgtcgtcgcgcaggcgccaggtgagcggatgcgtttccgcagtacgaattacggttttcatttgtactgctccagcaggtcaggaattgcctccggcgtcagatggctgtgagtatcctcatcaatcatcatggtcggtcccttgtcgcagttacccaggcagcaggtcggcagcagggtaaagcggccatcaaaggtggtctgccccggcttgatattcagtttcttctcaatggcggcctgaataccctgatagccggtgatgtggcataccacgctgtcgcagtagcggatcacgtgacggccaaccggctggcggaaaatctggctgtagaacgtcgccacgccttccacgtcgctggccgggatccccagcacatcggcgatggcgtagatcgcgccatccggcacccagccgcgctgtttctgaacgattttcagcgcttcgatggacgccgcacgcgggtcttcgtagtggtgcttctcgtgctcaatagcctcacgctctgccgcactcagctcaaaagcctcggtttgtggttgttgattctcgtgcataattagcggtccacgtctgacataacaaaatcgatactacccagatagacgatcaggtcggataccaggctgccgcggatcgccgacgggatctgctgcaggtgcgcaaagctcggcgtacggacgcgggtgcggtagctcatggtgctgccgtcgctggtcaggtagtaactgttgatccctttggtcgcctcaatcatctggaaagattcgttggccggcatcaccgggccccacgatacctgtaggaagtgggtgatcagggtttcgatatgctgcagcgtgcgctctttcggcggcggcgtggtcagcgggtgatccgctttgaacgggccttccggcatgttatcgaggcactgctgaagaatgcgcagactctggcgcagctcttctactttcagcatcacgcgggtgtagcagtcagagacgccccccccggtcgggacttcgaagtcgaagttttcatagccagagtaaggacgccatttacgcacgtcgaagtcgataccggtggcgcgcaggcctgcgccggtggtgccccactccagcgcctctttggcggtataggctgccacgccgacggaacggcctttcagaatggtgttgcgcagggcggccttctcataggagtccagacgcttcggcatccactcgaggaactcacgcagcaggcgatcccagccacgcggcagatcgtgcgcgacgccgccgatgcggaaccacgccgggtgcatacggaacccggtaatcgcttccaccagatcgtaaattttctgccgatcggtaaaggcgaagaagaccggcgtcatcgcgccgacgtcctgaataaaggtcgagatatacagcaggtggctgttgatgcggaacagctcggagagcatcacgcggatcacgttcacgcgatccggtacggtgatcccagccagtttttccaccgccagcacgtacggcatctcgttgacgcagccgccgagatattcaatacggtcggtatacgggatgtagctgtgccaggactgacgctcgcccatcttctcggcgccgcggtggtgataaccgatatccggtacgcagtcgacgatctcttcgccgtccagttgcagaataatgcggaacgcaccatgcgccgatgggtggttcggaccgaggttgaggaacatgaagtcctcgttgtcggtgccgcgcttcatgccccactcttccggtttaaaggtcagcgcctccatctccagatcctgtttggctttggtcagctcaaacgggtcgaactcggtggcacgcgccggataatctttacgcagcgggtgaccttcccaggtcggcggcatcatgatgcgacgcaggttcgggtgaccatcgaaggtaatgccaaacatttcccaggtttcacgctcataccagttggcgttggggaacagtttggtgaaggtcggcagatgcagatcgttttccgacagcgccaccttgagcatgatgtcgcggttgcgatcgatggagatcaggtgatagaaaacggaaaaatccgcggcgggcaggccatcgcggtgcgtgcgcagacgttcgtccatgccgtgcaggtcaaacagcatcacgtaaggcttcggcaatttcttcaggaaatcacccacctccagcagctgttcacgcttcacccataccaccggtacgccggtacgggttggctgaacggtaaaggcatccggcccaaagcggttgcgcagttcgccaatcaccgggtcatcaaggtgatcgcgggtttgccaggctggtgcggcgtcatgcgcggttaaatcggtcatattgttcaccattgcaaaaggtccgtggtgactgccggcgagacttcgcgctgttgtagattgatttgcgaagtggttctcccgcccgcaggcgcaaattaaatctcgtccggcgtccgcagattggtcactgcaatacgttcgccgcgtttacgctcgcgttccgactgcatattggcgcgataaacgccctgatcgccaaccacccatgagagcggacgacgttctttaccaatggactcctgcagcagcatcagcgcctgcatataggcctccggacgcggcgggcagcccgggatgtacacatcgaccggaatgaatttatccacgccctggacgacggaatagatgtcgtacatcccgcctgagttggcgcaggcgcccatggagatcacccacttcggctccagcatctgatcgtagagacgctgaataaccggcgccattttggtaaagcaggttcccgcgaccaccatcaggtccgcctgacgcggagaggcgcgcagaacttctgccccaaaacgcgcaacgtcatgcaccgcagtgaatgacgtcaccatttccacataacagcaagaaaggccgaagttgtacggccaaattgagttcttacggccccagttcaccatgtcatgcagcgcgtgttcgagtttccccatatacacgcttttattgacttcctgctccagaggatcggtaacgatctcctgtttctgcagggggtaacggtcgttctcaccgttaggatctatgcgggtgagcgtataatccatcttattgcctcgcttttactgcatatgacggttagtgggactgtctgtttccgggttaaccagcgtgcgacgggaacgcgcaggcgtccagtccagtgcgccgatgcgaacgagataaaccagaccagccagtagcactaaaatgaaaattgcggcttccacaaagccgacccagccgctctcgcggatagaggtcgaccatgcgtagagatacagggcttccacgtcgaagataacgaagaacatggcaaccagataaaacttcgcagaaagacgtaagcgggccgaaccgacggagtcgatccccgattcaaacggcgtgtttttactacgcgcgcgcgcgcgaccgccaaggtaccagccgccgacgagcatgaggcagcacaggccgatagcgatgatgagaaatatagcgaatgcccaatgatgagcgatgacttcagtggatgttgacatacgcattgcttaaccaaaaaagtgtagcgccaaaaccctctgctcttactggcagatgaacgccacagcgtttcacgggaggaataaaaaataaccgtgcaaaaaagcgtccctggtcgatgtgagaagcccagatgccgtggctttttacccctttctttaaccttttgtcaactttaacaaaagttttcataacattaatttacattggaatcttttcattaacattaaatgcccttttctgcgaaataaccttgcatactgttcggttttagtgttgttgaatcgtgtccgtttccgtcgtaaatcaaaaatcccttctattttgacaggatttagcctcgattcctccccccaaagaggggtattttcttgatctgcgacacggttttgttaattaccccaggaaatcggcaacaatccatccggttttttaacattagcaggaagtgttgaaagtgcagggaaaagtcgacaagctgagcgccttgtcacgccaatacgctgatttttctgcaaagaaatacaaaaaagattcaaaacatcaataagagtgcaaaaaaaagagccgccaggcgggaaaccaactcctgaggctctttttgggcacttacattctgttaccagtttttgtgatctttgttagcaagaatacccttacaaaaccaaggtattccctccctcttccggagtaagtgctgtgcccgtttcccagggatggatctcctggctcagagactgaaaaatcgcctgcggcagttcgctcaccgtccgcggattgcagctgacgacgtaccgggtgtccggcaacgccggtaacccctcactgatgccagccacgcgtagatccgggctcatcatttcgaccgggcgcgccgtcacgcccagcccggccttcaccgccgctttcacgcccgatagcgaggaagctccgtgggccagatgccaactgacgcgagcagtttccagcgcggcgataatatcctggcggaatggacttggctcttcgagcaggatcagggggatagattcccccttcgccagcacatattccgctgcacaataccagagagtaggtgatgttctcagggtgaaagaggtaaagccgggaggctgatgggtggtcaacgccagatcgaccagcccctcggccagcatctccatgatggcggcatgggggtgaactttgatctccaacgtcattctgggatagaaacagccgatgcggtttaacaaaaacggcaggatggtgtcagccgtttcttctgacgcaccgatgctcagagccccctgcaggctgccatacatcagcgacatacaggcttcatcgttaaaacggagaattttgcgggcatagcccagcagctggatcccctgctcggtcagcagcttattgcggccgtggcgggcgaaaagctctttgcccaccagctgttccaggcgttgcatttgctgactgaccgcggactgagtacgacacactgcggcggcggcggcggcaaaagtgttcaaatcagcgaccgcgacaaaggtacgcagcagatcgagatcgaggttgagtatgggacgtgttgtattaatcatctttcttcacttacaggtggctaacgctgacctgccttgttgatgctttacgccaggtttccggctattccctgagcctcgtgctcaccgtctaacggcggataaacaactggacgaacgttattacatgccaaagtactcgtctgggcaaatgcgcagaactgcggagtaatatattgttcgtatttctcattattatttattaccacgaccagccaggcgccatacgtcgccgcgggaacccggtcagtgatgctgagaaaatcgctcttctggcgtaactttccggcagaaaatgaacaataaaatcctgtaataacaatatattaaatctcaatgcaaccgcagttcttggcggttaacacggatattaacggtgatattctaacctatccccctcctttttataagccttaataaggattaactgagacaattttaaatttttttcaacattttatattaattaacaaacctcagattattacccgctaaaaataataataatgtggttgcacgctgttttttattaaaattatttaacatcaaaattacaagccaatcgcgcttgtatgcaggatagcgttttttagcgactccccctcctccctccccatattaccgggcaaacaaacgagataaatgatggcaaaatcgctactaaatctatatttacgaccaaaaaatcgacataaaaaggcataagccacagaccaaatccgcaatcggtagataaatcaattgcgcttaaaatccggcgttagcaaaatcttctcctgcaaagccttcaaaacagcggggagggggagtacattgttccgtgctgacttccacggcagggagtggcgataacagctaaaaggtcaagattcatgtcccccatcgaaaaatccagcaagttagagaacgtctgttatgacatccgcggcccggttctgaaagaagccaaacgtcttgaagaagaaggcaataaggttctgaaactgaacatcggcaacccggcgccattcggcttcgaggcccctgacgagatcctcgtcgacgtcatccgcaatttgcctaccgcccagggttactgcgattcgaaaggattgtactcggcgcgtaaagctatcatgcagcattaccaggcccggggtatgcgcgatgtcacggtggaagacatctatatcggcaacggcgtgtccgagctgattgtgcaggcgatgcaggcgctgttaaacagcggcgatgagatgctggttcccgccccggactacccgctgtggacggcggcggtgtcgctttccagcggcaaagcggtgcactatctgtgtgacgaatcctctgactggttcccggatctggacgacatccgcgcaaaaatcacaccgcgcacccgcgggatcgtgatcattaaccctaacaaccccaccggcgcggtctattccaaagaattgctgcaggagatcgtggagatcgctcgtcagcataatctgatcattttcgccgatgaaatttacgacaagatcctctacgacgaagcccagcatcactctattgccgccctggcgccggacctgctgacggtgacctttaacggattgtcgaaaacctaccgcgttgccggcttccgtcagggctggatggtgttgaatggcccgaaaaaacacgcgaagggctatatcgaagggctggagatgctggcttcaatgcgtctgtgcgccaacgtgccggcccagcatgctatccagacggcgctgggcggctatcagagcatcagcgaattcatcatccccggcggacgcctgtatgaacaacgcaaccgcgcctgggagcttatcaacgatattccgggcgtctcctgcgtgaagccaaaaggcgcgctgtatatgttcccgaaaatcgacgccaaacgcttcaatattcatgacgaccagaaaatggtgctcgacttcctgctgcaggagaaagtcctgctggtgcagggcaccgcctttaactggccgtggccggatcacgtacgcatcgtgaccctgccgcgcgaagacgacctggagatggctatctcccgctttggccgcttcctctccggctaccatcagctttaatcgcgccgccgccggcatttgcatccggcggcgatccctgcgcacaatggaacccgatgttgtcactgattaagggtccctatgagtcagagtcatttctttgcccacctctcccgcctgaaactgattaaccgctggccgctgatgcgcaacgtgcgcaccgaaaatgtctccgaacacagcctgcaggtggcgatggtcgcccacgcgctggcggcgattaaaaaccgcaaatttggcggccaggtcaacgccgagcgtatcgccctgctggcgatgtaccatgacgcctcggaagtactaactggcgacctccctactccggtgaaatatttcaattcgcagattgcccaggaatataaggcgattgaaaaaattgctcagcaaaagctggtggatatggtccctgacgagctgcgcgatattttcgagccgctgattgatgagcatcactacagtgaggaagagcagtcgatcgttaaacaggctgacgccctctgcgcttacctgaagtgcctcgaagagctgtctgcaggcaataacgaatttctgctggccaaaggtcggctggaaaagaccctggcatcgcggcgcagcgcggagatggattactttatgcaggtgttcgtcccaagcttccagctgtcgctggacgaaattagtcaggattcgccgctgtaaggttctggccgggcggcggttgtgctctacccggccagaatatcttaaaacggaaacagtaccgggatcagcaggacgcagaccaccatcaccagtatggtaaagggcacgcctattttgacaaaatcgctaaatgagtacttgcccgggccaagcaccagggtgttaaccggcgaggagaccggggtcataaacgccgccgaagccgccatcgccaccaccatggcaaaaggatagggtgagacgcccattgacttcgccgccgctaaggcaataggcgccatcagcaccgccgtggcggtgtttgagataaacagcccaatcgccgcgcacatcacgaacaggcagccgagcatcagataaggcccctcgcctccggcgacatccatcagtcccttcaccaccagatccaccccgccggttttttgcagcgccagggcaaacggcatcatcccaacaatcaaaataatgctcggccagtggatcgccttgtaggcgctttcggcattgatgcagcggaatttgcccatcagcagacaggcgataatcgcggcaatcgggttgggaatttcatcggtgagcatcagggctaccatcagcaccaggcagaaaatcgcatgcggagcctggctgtgggccggcgaagcgtcatcgacctcaaccggcatattgagcaccacgaaatcccggccgcgcttcgccagcaaggcaatttgccgccagttgccgaccaccagcaggatatcgccgagctgcagcggctcgtcgaccaccgaaccatccatcgctttgccatcgcgcttcatgccgacgatattgagaccaaaccgggtgcggaaggctatctcacgcaccgttttgccaatcatctctgaatccgggatcagcgccacctccgccatccccacatccagcgcctgatcggcaaaatactcgccgcgcaataccatcggctcaagcatttgctcgccgcagaactggcgtaaatcgacatcggaggcggacatatcgatcagcaggacgtcgcgggcgcgaaattccgataccccgttgacgttgacaattacccggcggaaccgccgccagcgttcaacgccgatcacgttggcgcagtagcgctcacgcagctttaaatcatccagccgctgaccgatcatcggcgaacccgggcggatggccagccggcgagcgcggccggtgaggtgatattcgcggatcaaatcgcggaaggtgcttctttttcgcccatcgcgtgcggagtcgccattatccgtcttcagcataaagcgcaccgccagcatatagacgatgcccaggatcagcaccaccaggccaatcggcgtgacgctgaaaaagctgaagccgtgcagtccctcgcgcagcaattcactgttgaccaccaggttgggcggcgtcgccaccagggtcatcatcccgctgataagcccggcgaagctcagcggcatcatcagccgcgatggcgaggtattcatccgcgccgagacgctaagtaccaccgggatgaaaatggcgaccaccccggtggagctcataaacgcgcccagaccggcgacggtgagcatcaggtagatcagcattttggtttcgctgttccccgccacgctcaccagccatgcccccattttggtggcgactccggtgcgcaccaggccatcgccgataataaacagggcggcaatcaggatcacgttaggatcgctgaatccggaaaaagcttcatttaacgtcagcgttccgctgaggacaaaggcgacaatgaccatcagggcgatagcatccatgcgcaccttgccggtagcaaacagcacaaccgcgatggccaggagggataaaacccaaatcaattcaccgttcacaacgtttccttgtcacaagtgggagtcgacatagtggcataaaaaagccccgacgacgcggggcgaaatcatgggtttacgctttaagacgcacatttaccacgccgtcagtctggcgttcaaccaccagatcttccaggctgctcagcacgaggtcggcttcatccaggcgaggggcatcggcgggcacgttgaccgcgatagtgcgacagccggccgccagtccggagaggagccccgccggcgcatcttccaccaccgcgcactccccggcaggcagacccagccgctcggcgcccagcagataggcgtccggcgccggtttgccgtgtttcacctgctcggcggtgacgaacacctcaggcatcggcaggcccgccgcgcggtgacgcgcgtgggcaaccggaatcgagccggaggtgacaatcgcccacgggatcccggcctcattgagcgtattcagcagggctaatgcccccggcagcgcgacgataccctcaatatcagtggcttctatctgctcgaggtagcgaaattcggcctggatatcctcctcgctgcgccccggcataaaatggcgaatggaggtaatggcctgcttgccgtgaataaaactgagaatttcatcatggtcaatggcgaaacgatccccccacttgcaccatgaacgctccaccaccggcaaggaatccaccagcgtcccgtctaaatcgaacaggaaacctttacactgcacgggcacctccctcaggcgttgataatttgattaatttcattactgctcagatgatactggcgcgggcaagcgtgccagacgctcagcatccgctgatatttctcccacatcggggtctgcgagttaaagccatgggtaccggcgtcaaaatggctgtagcggccttcaacgttgaccataaaacgcacatagccgagataacgcgcttcggtggcggcatcaaatccgaggaaggtgacccggcgttcatcgatacccgccgcgtctttcaggttggtccaggagacgtgcagcgcgtggtacatctccatgatatcaataacggtacggcaggtttcttccgtcaactggccaaactcgcggtccagttcacgcatctgtagcccctacccacgctctatgatggtttgcagacgacggtagcgttccgcattatccgggtcgagcatcgtcatcattttgtactgattggataaaatcagacgctgcgcattggtcatttccatgttgtgactcctgtagcacggtagggcgtgaaataaagaaggcgcataaatcatgcgccttcttttatatgcgttttccgtagtgaattacaaatcatcaaggaaagttttatccagttgtttgaaggcgcgcttaagcgtgtcagccagcgcctgataatcgggcttgccttcgaccggtgccagcgcctgccccgcctcctgcagtttaccgcgcacttcatagaaccagttaagaatggagggcggcagcggcgtcaccgaacgcttacccaaccaccagagtccctgcatcggcaggctcagcgcaaacagcgcggtagcgacggcggggcccagctggccgccaagagctatctgccagcagagggtaaaaatggcgattggcggcatgatgcggatggcatagcgggtggcacgaataatgcggttttcaataaacaccggcgcgaggcgcttgtcgagaggccaagtctttgcgtaatgctgcccgcggttgaacaagctaaagaagctaacggggcgtttctcaggggtcgacatggctttacctcaactttacatataaaacttaaaaaattcgtgcaaaacaccaactatgcatgacatcgttcaaaagattttggcaaaggatgccgcaatcaggtatcctgtgcccgcctgaaagggcggttagactctttgccaggctagtcaaattatcgcatattctgccattggctgaaaattatgcaaaatggcataaaatcaaatgtacttctctcatcgtgcccgaaaacagaacaaggcatgatgttaatcataaatgtcgaggtcatcctgcgctacgctaatgacacactgacgtttttttagccacgtatcataaaaaggtacttccatgtcgagtaagttagtactggttctgaactgcggtagctcctctctgaaatttgctatccttgacgccgtgaacggcgacgaatatctgtccggtttagcggaatgcttccacctgccggaagcccgtatcaaatggaaaatggacggcagcaaacaagaagccgagttaggcgcgggcgccgcgcacagtgaagcgctgaactttatcgttaacactattctggcacaaaaaccagaactgtctgctcagctgaccgcaatcggccaccgtatcgtacacggcggtgaaaaatacaccagctccgtggtgatcgacgagtccgtaattcagggtattaaagacgccgcgtctttcgcaccgctgcacaacccggcacacctgatcggcatcgctgaagcgctgaaatccttcccgcacctgaaagacaaaaacgtggctgtattcgatacggcgttccatcagaccatgccggaagaatcctatctctacgccctgccgtacagcctgtacaaagagcacggcgttcgtcgttacggcgcgcacggcaccagccacttctacgtgactcaggaagccgctaagatcctcaacaagccggtggaagagctgaacatcatcacctgccacctcggcaacggtggttctgtttccgctatccgtaacggtaaatgcgttgacacctccatgggtctgaccccgctggaaggcctggtgatgggtacccgctccggtgacatcgatccggccatcatcttccatctgcacgacaccctgggcatgagcgttgacgcgatcaacaaaatgctgaccaaagagtccggcctgctgggtctgaccgaagtcaccagcgactgccgctacgtggaagacaactatcaggaaaaagccgacgctaaacgcgcaatggacgtttactgccaccgcctggcgaaatacatcggttcctacaccgcgctgatggacggccgtcttgacgccgttattttcaccggtggtatcggtgaaaacgccgcgatggtgcgtgagctgtcgctgggcaaactgggcgtactgggctttgaagttgaccatgagcgtaaccttgctgcccgcttcggcaagtctggcttcatcaacaaagaaggcacccgtcctgccgtggttatcccgaccaacgaagagctggtcatcgcgcaagacgccagccgtctgaccgcataattccacatcgccagccctgacccgcaataattcgagctgcaggaaggcggcgacacagcaaaaccccggccgcgtacagcgcgtacgccaccggggtgagcaagtagagccaacgcacgtgcaacttgaaatatgacggatagctggcggtgctgttttgtatcccgcctgatactggcggtaacgaaagaggatataccgtgtcccgtactatcatgttaattcctaccggtaccagcgtaggtctgaccagcgtcagcctcggtgtgatccgcgctatggaacgcaaaggcgttcgtctgagcgtctttaaacctatcgcccagccgcgttccggtggcgatgccccagaccagaccaccaccatcgttcgcgccagctcctccaccaccaccgccgctgaaccgctgaagatgagccatgttgagtctctgctctccagcaatcagaaagatgtgctgatggaagagatcattgccaactaccacgcgaatactcaggacgcggaagtggtgctggtggaaggcctggtaccgacccgtaagcatcagttcgcccaggcgctgaactttgaaatcgccaaaacgctgaacgctgaaatcgtcttcgtgatgtctcagggcaccgacacgccagaacagctgaacgagcgtatcgaactgacccgtaacagctttggcggcgccaaaaataccagcatcaccggcgttatcgtcaacaaactgaatgcccctgtcgacgatcagggccgtacccgtcctgacctgtcggaaattttcgacgactcgtcgaaagcaaaaatcgtgaagattgacccggctcagctgcagaaaggcagcacgctgccggtgctgggcgcagtgccatggagcttcgatctgatcgcgacccgcgcgatcgacatggctcatcatctgaatgcgaccatcattaacgaaggcgatatcaatacccgccgcgtgaaatccgtgactttctgcgcgcgcagcatcccgcacatgctggaacacttccgccctggttctctgctggttacctccgcagaccgtcctgacgtgctggttgcggcctgcctggcggcaatgaacggcgtggaaatcggtgccattctgctgaccggcggctatgaaatggacgcgcgcatcagcaagctgtgtgaacgcgctttcgcgaccggcctgccggtattcatggtcaacaccaacacctggcagacctccctgagcctgcagagctttaacctcgaagtaccggttgacgatcacgagcgtatcgagaaagttcaggaatacgtggccaactacatcaacgccgactggatcgaatcgctgaccgcgacctccgagcgcagccgccgtctctctccgccagccttccgctaccagctgaccgagctggcgcgcaaagccggcaaacgtgtcgttctgccggaaggcgacgaaccgcgtaccgtgaaagcggcggcgatttgcgccgaacgcgggatcgccacctgcgtcctgctgggtaacccggatgagatcaaccgcgtagccgcggcccagggcgtggagcttggcgccggcattgaaatcgtcgatccggaagtggttcgcgaaagctatgtgggtcgcctggtcgaactgcgtaagaacaaaggcatgaccgaagcggtcgcgcgtgagcagctggaagacaacgtggttctcggcaccctgatgctggaacaggacgaagtcgacggtctggtatccggcgcggttcacaccactgccaacaccattcgtccgccgctgcagctgatcaaaaccgcgccgggcagctcgctggtctcctccgtgttcttcatgctgctgccggaacaggtttacgtttacggcgactgcgcgatcaacccggacccgaccgccgatcagctggcggaaatcgctattcagtccgctgaatccgcgattgccttcggcatcgaaccgcgcgtggcgatgctctcctactccaccggtacctccggcgcgggtagcgatgtcgagaaagtccgcgaagcgacccgtctggcgcaggaaaaacgtcctgacctgatgatcgacggcccgctgcagtatgacgccgcggtgatggctgacgtagcgaagtccaaagcgccgaactcaccggtagctggccgcgcgaccgtgttcatcttcccggatctgaacaccggtaacaccacgtacaaagcggtacagcgctctgccgacctgatctccatcgggccgatgctgcagggtatgcgcaagccggtcaacgacctgtcccgtggcgcgctggtagacgatatcgtctataccatcgcactgaccgcgatccaatcggctcagcagcagaagtaatctgccgctgtagtcaaagcaaaaggcagccgaatggctgcctttttgtcgtcaggaggcgagcgacgattgctgccgcgcgtttgcgatctttattcgcgctcgctctcttccgcatcatcatactcattaccggcgttgcgggtcatccacagcgccagcgctttcagggagtccggcgtgaactcatcgcagcgggcggtgatctcttccggcgttaaccagcacacctcgctgacctcttcttcctgcagggcgaacggcccgtgggagacgcagctgaacagacttccccagacgcggcagaatttgtcttcgtaataaaactggccgtgatcggcaaacggcaccccggcgatgcctaactcctcttccgcctcgcgacgggccgattccagcagctgctcatcagcctgcacgacgccgccagcggtggcatccagcatgcccggatgaaagtcttttgtctcggtgcgtcgctgcaccagaattttccccattccgtcatgaacgacgatataggtcgcccggtggcgcaggcactgcgcgcgcatttgctcgcggctggactgtgctatcacctcattgttttcattaacaatatcgacccattctgtgcttgccaaatgattctgttccgccatcaggaaaccttactttaaatgcgctctcgcggcgcgtctttatgattgagggctaaattacgggtaaattgcaacctctgcaataacctgattatcattgagtgctaaaacctgcagccgcccctgatccagcagcccatagctggcggaatatccccctttcgggatactcactgagccgggattaaagaggtaaattgcgccgcgtttttccgcgaccggtatatgagtatggccatatgccaggacatcgccagcggccagcggcggcagattatccggactatagagatgcccgtgggtcagaaacaggcgatagcgttcgctaagcacctgctgccagggcgcggtgattggaaaacgaagcagcatctgatccacttcgctgtcgcagttgccgcgaacggcaacaatgcgttccgccacgctgttcaaccgctccgccacctcacccggcgcatacccctcaggcagcgcgttgcgcggaccgtgattgagcacatcgccgagtatgatcagccacctggcgccgctttgcgcgaaccgttcaagcacgcgttccgtggcgggcagcgaaccatgaatatcggaggcaaacatcagcttcataggttccatctccactggttacgatgcctctatgatagcggaagcgcggcgggttatcagcctcagcgtttggcggaaagcgccacgtaacgctggattgaggcccgctgccactggaaagacgcataatcagccagcgcctccggtaccttatcgccattgagaaccaggcgattgagcatcagcgccaggtctgcgtcggcaatagaccattcgccaaataaattttgcccgccgtgggccagtagcatggtggcggtggcaaacagcttttccgcagattgcctgccggcctcgctgaggtccggcattttcgccccgccaaacaccacggcggtggatcgctcttcacgaattggcatcagatcgctgcgcagccaggcctggatctgccgggcgcgggctcgtttttgcagatcatgcgggtagatgcgctcccactccggcggcgcgaaacgctcatccagatactcggtaatcgccgaagactcacttagcgcgaaatcatcaacctccagcagcggtacgcgacgggtggcggcatagcctgtccagcccgcctgcagatgttcgccgcggttcaggtcgacggttttaagggtaaaaggcaggcttttttcctgcagagcgacatagacagacatcacgtacggtgagaaaaaatcggcatcggaccacagggtaatgacaggctggctcatagcttcctcaagggtggtagacaggacaataagccaacatagcctgtcttacaggcgatgtcactgctcgagcgcggacgactcgtcgcctggctgccgggtcgcttgcggaatttctcccgggtggcgcagcttcacctatactcgaacagtttgcgacccacgacggcgggaaatattatgatcgatctttactatgcacccaccccaaacggccacaaaatcaccctgttcctcgaagaggcggagctagcctatcggctaattcgggtcgatatcggcaaaggggaacaatttcatccgcagtttctggcgatttcgccgaataataaagttccggctatcgtcgaccacatgcctgctgacggcggggcgccgttgagcgttttcgagtccggcgccatcctgctctatctggcggaaaaaagcggtaagctgctgagcggcgagctgcgggaacgctacgtcacgctgcagtggctgttctggcaggtcggcgggctggggccgatactggggcaaaatcaacatttttcccactccgcgccgcaaaccgtgccctacgctattgaacgttttcaggtggaaacccaacgactgtatggggtgctaaatcagcgtctgggatgcagcccgtggcttggcggcgaccactacagtatcgccgacatcgccgcctggccctgggtgaactgccatgtccgacagcgtatcgatctggcgaactatccggcggtgcacaactggtatgagcgcattaagcagcggccggcaacggcggaagcgatgttaaaaattcagctttattaaccccctgctcgcccgtcgcgctttgttgtatgattgcaggacttacaccacggaggaagcctgcaatgtctcaaccagacgccattattcgtattaagaacctgcgcctgcggacttttattggtattaaagaggaagagatcgccaaccgccaggacgtggtagtgaatgtagccattcactaccctgccgataaagcgcgcgacagcgaggacatcaatgatgcgctgaactaccgcaccattaccaagcgtataatcagccatcttgagaatggccgtttttcgctgctggaaaaattaactcaggatgtgctgaatatcgcatgcgaacatcactgggtcacatatgctgaagtggagattgataaacttcatgcgctgcgctatgccgactcggtgtccatgaccatgagctggcgtcgctaaccatgtcagggaggtggtatgaagatcctgcttactggtggtaccggcctgattggccgacatctgatacccagattgctggagctcgggcatagcgtcacggtctccacgcgacatccggataccgcccgcgcccgtctcgatccgcgcgtcaccctgtggcgcgatttcgagggccatcaccacctcaatgacattgatgccgtcatcaatctggcgggtgaacccatcgctgataaacgctggacggccgagcagaaacaacgcttgtgccatagccgctgggatctcacgcagcggctggtgggcctgatccacgccagcgacacccctccctccgtgctgatcagcgggtctgccatcggctactatggcgacctcggcgaggtggtggtgaccgaagaagagccaccgcacaatgagtttacccataagctgtgcgcccgctgggaacaaattgcctgcgaagcgcaaagcgagcgcacccgcgtctgcctgctgcgcaccggcgtggtactggctccgcggggcggtattctcggcaaaatgacacccgcctttaagctcggcctcggcgggcctatcggcaacggcagacagtacctggcctggatccatatcgacgatatggttaacggcattctgtggctgctggataacgatctgcgcggtccgttcaatatggtttctccctacccggtgcataacgagcagttcgcccatgcgctgggtcatgcgctccatcgaccggcgattttccgcgttcccgccgccgctatccgcctgttgatgggggaatccgccgtcctggtgcttggcggccagcgcgcgctgccaaagcgtctggaggccgccggctttgccttccgctggtacgatctggacgaagcgctaaaggatgtgctgagttaatggctgacacaggggagcattggctcctctgattccattctgctggctcatgctccacgcctggatggcctccccctggcgctgcagcatcgccatattcaggacaaccagcgcccttaatcgcctgaattcaccgccagccggccggttcgccggtgttacctggcaaagcaaagtgctaaggtaggcttttctttctgcgtattgactgctttatgacgaccatcaccacaccacgcctttcgcttacccgctttgttaccgatgactggcccttttttctgcgcctgcgccaggatccgcaggtgatgcgttttatgggggaggtgttaagcgaggaggcgctgcgcagcgtcttcgtcagtcgctgtgccgatcccggggtgtttgtattgcgcgataaattcggcgaggcgctgggcgatattgggctccgcatcagtccgaaaaatccgcacgaagctgacgtcggctacgcgctgctgcctcaggctcagggaaaaggctatgccagcgaagcgctgcgggcggtctgcgagtatggtttcaccaccctgggggtgcaggccatcaatgcctgggtgctgggtgaaaaccgtggctcatcgcgcctgctggagaagcaaggctttgtgcgcacccaggtgctggagaaagcctatcatctgaacggcgtcgattacgatgactggatctatcggctggagcgggaagctcatccggcgtccgcagacgccggatgagccgattatttcagcgaacctttcagaaactgctgcaggcgcgggcttttcggcgcgccaaacagcgcatccggatgcccttcttcttcaattttaccctgatgcagaaaaatgacatgtgaagagacgtggcgggcaaagcccatttcatgggtcaccaccaccatggtttttccctcttccgccagctgctgcataatgcgtaacacttcgcccaccagttccggatccagcgcggaggtcggctcatcaaacagcagcacttccggttccatcgccagcgcgcgggcaatagagacacgctgctgctggccaccggaaagatgcaccggatacttcgcctgctgacgttcgtctatcccgaccttggccagatattttaccgcccgttcgcgcgcttcctgtttgcttaagcccagcacctgaatcggtgcttccatgacgttctccagcaccgtcatatggctccacagattgaaatgctgaaacaccatggtcaaccgggtgcgcagcaggcgcaactggttcttgtcggccaccttcagctggccgtctttatcccgtaccagaccaatattttggccgctgacgacgatcgtgccttcgctcggtttttcaaggaagttaatacagcgcaaaaaggtactttttccggaacccgatgaaccgatgatgctgataacgtccccggctttcgcctgcagcgagacgcccttcagcacctcgtgttccccatagcgtttatgcagatcgataacgtttaatttattgtcggacatggcgttctcaatgcgtcgaagaaggtttgatatgctgcaaccagcgcttttccgctttacggaacaagctaatcagcacatacgagataattaaataaagcaccgcggcgatgccaaacgcggtgaacggctgataggtggccgagttgatatcgcgggcgattttcagcagatccggtaccgtagcggtaaacgccagcgcggtagagtgcagcatgaggatcacttcgttactgtaggccggcagtgcaatccgcagcgcggaaggcagaataatgcagcgatacagtttgactgacgagaagccgtaggcccgcgccgcttcaatttctccggcgggtactgagcggatcgcgccggcgaaaatttcagtggtataggcgcaggtattcagggttaacgccagtaccgtgcagtttagcccgctgcggaaaaaagcgttcaacagctccgtgcctttgacgatttccagggtatacatgccggagtaaaaaaccagcagttgcacatacagcggcgtgccgcgaaatatgtaagtgaacagccagatggggaactggataaacttattgctcgagacgcggccgatagccagaaacaccgccaggatgccccccattaccactgaagagatcagcaaccataaggtaatcgccacgccggtaaagcgatagccgtcggtccacagtagtgacttccagtactcctgaataatttcaatcacaggtcagccctcttcacgccaacggtatagcggcgttcgagcagcagcagtacgccattagaaacggtggtaaacaccagataaatcaggccgcagacgatggcgaagtagaacggctgccaggtgcttttcccggccagctgcgtggctttgaccacatcctccagccccagcaacgagaccagcgccgtcgccttgaggataacctgccagttgttgcctatccccggcagcgcgtagcgcatcatcgccgggaagagaatacgccggaacgtctgcccgccgctaaagccaaaggcggtagccgcttcgatatgccccttcggcaccgccaggtaggcgccgcggaaggtttccgtaaaataggcgccatagataaagccaagggtaataatcccggcgatcatcggatcgatatcaaactgggccatacccagcgcgtcggtaacgctgtttagcgcaatctgcaggccgtagaaaatcagcagcatcagcaccagatcgggcacgccgcggataagagtggtatagccttcaaataccagcgccagtggacggttgctcgataactttgcgccagcgcccgccagcccaatcaggacggcgagaacgaccgagctgagcgcaagctccagggtgacgagcgcaccctgcaaaataacctgtgaaaacccatacagcatgctgcctaccctgtctgtcattcaccattgcgcgcgaaacgcacgcaatggcgaggcgtgagaattattcgccgtatacgttaaaatcgaaatattttttcgccagcttgtcgtaggtgccgtccttacgcatctctgcaaacgccttattcagcgcttcacgcagttcgttgtcttccttacgcagccccataccggtgccaacaccaaacagtttctcgtctttgattgacgggccgccaaactggtaatctttaccaataggctgtttcaggaacccttcgctggccgcgacctcatcctggaacgcggcgtcgatccggccggcggtcaggtcggaatagatattgtcctgcccctgataggagacaatttcgatacctttcggcgcccagtgctcattgccataggtttcctgagtcgtcccctgcagcacgcccacgcgcttacccttgagggtggcgagatccggcgttaccgggctgccctttttcaccaccagacgcgaatctgccgcatacagcttgtcagtgaaggcaatttcctgctggcgcttttcagtaatcgacagcgaagacataatcgcgtcgattttcttcgcttttaaggaggggatcagcgcatccagcgggttttcaacaaaggtacattgcgtattaatacgcttacacagctcttttgccagatcgatatcaaaaccgaccaattctccctgcgcattcttcgattcgaagggagcataagtcggatcggtaccgatacgaattttttgcgggatggcggcaaagaccgtggaaacgctggaaagggccagcgctaaagagagagacaacgccagttttttcataactatcctcgacagactgtcattctaacgggtttattagaactatttacgccagttatcgtgccattattcgccccttaagggcaaagatttatgcaccagaaaggccgattttttgcatcagaaacgcttaactatgcattttttagccaaaaaactggctgcttttgcactgaaatgatccatagcgcgtttagatgcacccttttggggcatggatacgaacctggcggcaggcccaccccattgtgcgggcctgcagcagtcttagtcgccgtacacgttaaaatcgaagtatttcttcgccattttgtcgtaggtgccgtctttacgcatttcgcccagcgctttatcaaacgcggctttcagctcggcgtcgtccttacgcaggccgataccggtgccgtcgccaaagtactttttgtctttaacggacgggccggcgaaggcgaaatctttcccggcaggctgtttcaggaagccttcgctggcggcgacttcatcctgcagcgccgcatccagacggccagctgcgaggtctgaatagatcagatcctggttctggtaagccaccacgtcaacgccctggctgcgccagcggtcgttagcataggcttcctgagtagaaccctgcagcacgccgacgtgcttgcctttcagcgcctccagcgtcggctggatcggcgaccctttggcggcgatcagacgcgagtcagcggcatatagcttgtcagagaaggcgatctcttgctggcgcttctcggtaatagagagggaagagatgatggcgtcaatcttcttcgccttcagggaggggatcagggagtcaaaatcgctgccgacccaggtacatttcaccttaattcgggagcacaactcattgcctaaatcgatatcaaagccaacaaagtcccctttcgcgtctttcgacgaaaatggcgcataggtcgcgtcagtgccaatgcgaatgctctgcggcagagcagcaaacacgctggccgtgctgctcattcccacgagtaaagagagagccagaatcgtcttcttcatacagtacccttaagtgtcgtgatgtggtgcgttgcttgttatggtgattgccgatcaatcctgcagtttttgtgccatcttcccggtgcgtgccgggaacagggttaaatttgttaaaataaagttgcaggattgtcttaaaagggaagataccagcattactggcgaaaccgcagcgcctgagcgcaaaaagacgaaataaatgtcgaggatttgatcgcggcaacaaatttgcaccaccgcagcgcaagcgtacatttcatgcaccactatagtgcgacactaggccccctgccagcgggtaaacaagtcgtgctccagactaatatcaaattgatcgagtacccgattgacggtctggttgatgacatcgtccaggctttgtggccggtggtaaaaagccggtaccggcggcattatcaccgcccccagctctgcagcctgaaccagcagacgcagatggcccaaatggaacggcgtttcccgcacgcagagcaccagcggacgacgctctttcagcacgacatccgccgcccgggtcagcaggccatccgtatagctatggacaatgcccgagagcgtcttcattgagcagggtaaaatcaccatcccggcggttttaaacgaaccggaagagatactggcggcgatatcgcgggcgtcatgcaccacatcggctagcgcctgcacctcacgtacggagtagtcggtctccatggccaacgtctggcgcgccgcctggctgaggatgagatgagtttcaatatccggcacatctcttagcacctgcagcatccgcacgccgtaaatggcgccgctggcgccggaaatgccaataatcagtcgtttcacgttctgttaccccttgcgcgtgtgccgcagactttgccggattatagcctctggcgcaactattgacgcacagttgaggggcgaaaaaaagcccgccgtcctttaggtacggcaggcccgcgacgcgtgaacggcttaaccctcgttgtgcatctcgaggttttcgacttcgttttgcagctggaccgctttggcatcatcgttacgcagggagtcaagatagtcgaggtactgctggtcgacatcccgggtcacatatacgccgttgaacaccgagcattcaaactgctgaatatccgggttctccgcgcgcaccgcgtcgatcagatcgttgagatcctggaaaatcaggccgtcggcgccaatgatctggcggatctcatccacttcgcggccatgggcgatcagttcgttggcggtcggcatatcgataccgtacacgttcgggaaacgaatttccggcgcagcggaggcgagatacacttttttcgcccctgcttcacgcgccatctcaatgatctgctccgaggtggtgccgcgtacaatggaatcatcgaccagcagcacgttcttatcgcggaattccgcacggttggcgttgagcttacggcgaacagatttacgacgcagctgctgaccgggcatgataaacgtccggccgacgtagcggttcttcacgaagccctgacgataaggtttgtcgagaatgcgggcgatttccagtgcgatgtcgcaggaagtctccgggatcggaataacgacgtcaatatccagatcttcccactcgcgggcaatcttttcgcccagcttagtccccatgttgacgcgggcgctgtagacggaaattttgtcaataaacgagtccggacgggcaaaatagacgtactcgaacaggcacgggttgctgaccggattatcggcacactgacgggtatagagctggcccttctcggtaatatagaccgcttcgcccggcgccacatcgcgcaggaattcaaaaccaagcgtatcaagggccacgctctccgaggccaccatatactcggtgcgaccgtcgccaacgtcacgtttacccagcaccagcggacgaatgccgttagggtcgcggaaggccaccatgccatgcccgatgatcatcgccacgcacgcgtacgcgccgcggatcaggcggttggtcgccgcaatcgccgcgaagatgttgtccgcttccagcgggtagtgacggaagttatccagctcactggcgaaaatattgaggaggatttcggaatcagaggtggtattgatatggcggcgtttttcttcaaacagctttttacgcagctcgtgcgcattggtcaggttgccgttatgcgccaatgtgatgccatacggcgagttaacgtaaaacggctgcgcctcggaggcgctggagctgcccgccgtaggataacgcacgtggccaatacccatattgccctgcatacgctgcatgtggcgggcctcgaatacgtcgcttaccagcccgttagccttacgcaaccggaagcagttgttggcatcaatggtgatgatgccagcggcatcctgtccacggtgctggagcaccgttagcgcatcataaatcgactggttaaccggcataacaccggcgataccgacaataccgcacatacgtcttttcctcgttcagcaacgacccaaagtctatactttaggcaagaaacttgacgagctttgcaggtattcaaaaaaccatctgatgacgggggtaaaatagggaataaactgcgactgatgccagtcatcgctcttcgccatcccggtaaaggtgtccaggaagaacaggatagcggcgatgatcagcaccccacgtagcgcgccgaagcagatccccaataccctgtcggttcctgacaaaccggtcttctccaccagctggcctatcacatagttcacgatagcgccaacgatgagcgtcacgataaacagcgccgcaatagcaatcccatttcgaacccgttcatcctcaaagcccgtaaaccagacagacaggtcagcgtagtaatggctggcgacataaaacgcgcaaccccacgtgactaacgataaagcttcgcgaacaaagccgcggatcaggctgaccaggcaagaaagacccagcaccgccataatggcgtaatcaatccagaccatatacgtcccacgatttacgccctgtcgtccagttcggggcgcattctaacagaaaaagaaaacgtttgcgtagggatttccatgccctacagaaataaaaatggcgctgaaaaaacattcaacgccagactgcctttcgcctcttcagggcggctgagacagggtttgcggggcgtttctccccgccacgttctctccgcatggcggaaaaaacaatcagttcggggtgaagcccatcaccaccccgctaagcccggagatctgctgcagatcgcccagctggcctttcagcttgtcttttgacgcatccgggccgacgaggatgcgggtaattttaccctgtaccggcgtcgaaggcgacgtatagactttgaaacccgaggcccgcagtttaccgacaatctcattcaccttatcggcgttcttcaacgcgcccagctgaaccacataggctttgccggtcggcgccggcagggccgcctgctgctgcggtggctgttgctgctgtggcttagccggcggcggcgttggcgtcgaggcctgctgttgcggctgcggtttcggctgcggcttgggctgcggtttcgcggccaccaccggctcctgaacgtcatcgaagctgttgctgttcaccggaatacgcgatggatctaacgatggcgcggcggcatcgcccgcccgcacctcttccgccgccccttccggcggttgcgaaggcaacgcctgggttgccgccggcaacatatccggttcatcgcgatcgcctggtttcggtaccagcgggatcgcggcaaactcatcctggtaatgctttttctgcccgtccagcagccctggcaggataatcacccccagcgccaccagcacgattgtcccgactaaacggttctgaaacttactcgccaccgattctccccgcgtctatctcttccataacctgcgctacggtgtgaaacgaaccacacaccagcacggtatcttccactttagcgtcagccatggccgcacgccacgcctgcgccacgctgctatagactgtaccgcagcgcaaatgttccaccagctgctctgccgtcgcgccgcgcgggccttccagcggcgcgcagtaccaggcatcgacttccggggccagattggccaacgtgccggcgatatccttatcatgcagcataccaataaccgccagcacgcgtcccgttttcgctaacgttttgagacgcccggcgagataggccgccgcgtgcgggttgtgcgccacatcgaggatcactcgcggggcgtcgctaattatctgaaagcgtcccgggagcatcgcatcgcggatccctgcgcgcaggatagcgtcatccacggcaagcccgctggcgcgcagcgccgccacggccgtcgccgcattcggcaacggcacctgaggcagaggcaggtggcttaacgcccctgccgtatcgcggaaggaccacttttcgccttccacctcatagcgccagtcgacgccgcggcgctggagcagcgcgcccttctcgctagccacttccgcgatggtgagcggcatatccggctcccccaccaccgccggtttaccggcgcgaaagatgcccgctttttcccggccgatactttcgcgatccggccccagccagtcggtatgatcgagggcgatgctggtgaccactgcgacgtcggcatcaacgatgttggtagcgtcgagacgcccgccgagcccgacctcaaggatcaccacatccagctgcgcctgcttaaacagccacagcgccgagagcgtgccgtattcaaaataggtcagcgagatgtcaccccgcgccgcttcgatttcagcaaacgaagccgtatgcgccgcctccggcagttcagccccctgaatgcgcacgcgttcggtgtagcgcaccagatgcggagagctgtagacccccactttataaccggccgccatcaggatggtttccagcgtgcggcaggtggtgcctttgccattggtgcccgcgacggtaaaaacgaacggcgccggtttaacgatatccatctgcccggcgacctcgctgacgcgcgccagcccaaggtcgatggttttattgtgcagatgttccagataagaaagccacgtagccaggggcgacgtggcctgaggaataggatctttttccatgatgcccgtaagaattgacggttaacgcgtatgaataaaaaagggcagcgccgccaggccctgccctctgctttatcaggcctcaggttcctgatccggtgccggcggcaccaccacgccttcatgaggcgcttccgaaacggcaaccggcgccggcaggttcatcagcttcgccagaatgctggccagcttgagacgcatttccggacggcgaacgatcatatcgatcgcccctttttcaatcagaaactcactgcgctggaatcccggcggcagcttctcgcgtacggtctgctcgataacgcgaggaccggcaaagccgatcagcgctttcggctcggcaatgttcagatcgcctagcatcgcaaagctcgccgatacgccgcccatggtcgggtcggtcagcacggagatgtacggcagtccgcgctcctgcattttcgccagcgccgcggaggttttcgccatctgcatcagcgacatcagcgcttcctgcatacgggcgccaccggaggcggagaagcagatcagcgggcagttatcttccagcgcctgctccaccgcgcgcacaaagcgtgcgccgacgacggaacccatcgagccccccataaaggagaactcaaaggcggcggcaaccaccggcatcgcgtagagcgtacctttcatcaccaccagcgcgtctttctcgcccgtctctttctgagcggacgccaggcggtctttgtatttttttgaatcgcggaacttcagcacatcttttggctcaagttcgctacccagttctaccagagaaccttcatccaacaggctatgcaggcgattacgcgccgacatgcgcatatggtgatcgcacttaggacaaacctccaggttgcgctccagctcggcgcggtagagtacctgaccgcagctgtcgcacttggtccatacaccctcaggaatgctcgccttgcgggtgggagtgatgttgcttttaattcgttcaatccagctcattgataacctttctgcctgaacctggtcgatgccagttttgtcgtaaggggcgcataatgccatttttgcctcttacagaccatgaatgttgcacattaaatcatatcatcccggaacatgggataaaaaagtggtcaaaccgctgcgcgtgacgctctgcaccgccacgcgcaacacaggctaaactacttcgcctgcttcgccgccgcccgcttgtggcgaataatctcaatcacgcccggcaggacggaaagcacgatgatcgccacgatcagcagcttcaggttctcctgcaccaccggcaaatcgccaaacagatagccggcataggtgaacagcagcacccacagcagcgccccaaccacgttataggctgcaaaatgacgataggacatatgccccattcccgccacaaacggcgcgaaggttcggactatcggcacaaagcgcgccaggataatggttttcccgccgtgacgttcgtaaaagctgtgggttttatccagatagctgcgacggaatatctttgagttcggattgctgaacagcttttcgccgaacagccggccaatggtgtagttgaccgcatcgccgacgatggccgcgatgaccatcagcagtaccatcaggtggacattgagatcgttggttggcaaggccgagagcgcgcccgcgacgaacagcagggaatcgcccggcaggaatggcgtcaccaccagcccggtttcgcagaacagaatcaaaaacagaatggcataaacccagacgccatactgggcaaccagttcggcaaggtgcacatcaatatgcaggatgaaatcaattaaaaagtgaatcaagtccatgtttgtctttacccttaatgaccctattagtccgccagaaacagcgggcccattggcagcaccggtaaatcatagtgggccgggtaatccaccgacaccagatacaacccttccgcttttgccgttgccgcagcgagcgtcctgtcttttgctgccagcagttctgccatccagctctccggctggtttccggccccgacctccatcaggctgcctacaatattcctgaccatatgatgtacaaaggcattcgctttgatatccaccaccacatacgcgccgtagcgggtaacgttaatatgcatcacgttgcgccacggggtacgcgactggcactgtaccgcgcgaaacgaggtaaagtcattctctcccagcagacactgcgcggcgcgctgcatacgctcggcgtcgagcggctggtgaaaatgcgtcactccctgacttaacaccgccggacgcaggcgatgattatagatgacgtagcgatagcggcgcgccgtggcgctgaaccgggcgtgaaaatccgccggtacatgtttgacccaacgcaccgcgatgtcaccaggtaaattcgcatttacccccagcgtccaggcggcatctttccgctgcgcccgggtttcgaaatgcaccacctggccggtgccatggacgccggcgtcggtgcggccggcgcaaaagacggtaatcggttcgttcgccacctgcgagagcgccttttccagcttctcctgcacgctgcgcacttcgttttgccgctgccagccgtaatatttgctgccgtcgtactcgatgcccagcgcgattttacagatcggctgttgctccatctcagacatcagtacaggtactcctcaatcagcttctcggcgatcttcaccgccatcagcgcgccgccgaagcgcacgttatccgctaccgaccagaactggatctgctccgccataccgtaatcgttatgcacgcagccgatggagaggcgggcattgccggaggcatcgccaacctgggtcgggaattcgccctcttcagaaagttcgatatcctcgccgcgggtaaaagcgtcgcgcgcctcctccgccgccagcgggcgcatcgcttcgaagctcaccatctgcgcatggccgtagaagaccggcgactgaacgacgctggcggagatcatcagcccgtcatcctgaagaattttgcgcgcttcatcgacgatccggcgctcttcgcgcacgctaccttcacgatccggcagcagcggcagcatgttgaacgccagctggcgaccaaagaaatcgtcttcatcgatagggatgccgttcagcagcttagcgctctgacccgccagcgcatccaccgcttttttcccctgccccgaggcggagagcaggttagtgacgctaatgcgcgacaacccgccctgatcgatcagcggtttgagcgccgtcaacagctgactggtcaggctattaggcaccgcaatcaggttgcggttgcggtaatcgcctaatacgaacgggttcacgtccggcaccaccagcggtacgtccggctccagcgcaaacaggccgctgagatcgataaccagacacccggcgttggtcgcttcttcgacatacgctgcactggcttcgacgccggcggcgaagaaagccagctgggcctgggtccagtcaaattcggcggcgtctttgacgatcaccgacttgccaccaaaacgcagatgttcgcccgcgctgtcgttgcgcgccagagcaaaaatctctcctaccgggaactggcgttcagcaagagtttcgagcagggcttcgcctacggcgcccgttgcgcccagtacggcaatattccagccttcagacatggtggttaactccagaaataaagcggccccgccggagtatccggcaggggcattaagaagacattaacgaacaggatgatgcacggcgttaaaaccgagctggcgcaacagcgtcgccgcctgctcatcgctgcactgcacatacagcgaagaccattcgcgacgttcctgataatttttacgcagcttgtcgaattcaccggcgacgccggccaccttccgcagcggcgcatcatcgcggcgcacatcatacaccaagtggaccagtcttttcagcgtcggctgatcgagcggtccatgcagggtaatgcggccaaattccggcgccggcagcagagtgtccagcgctacctgctgcggatggccgataaaggcgctgtaggcttcaaaaacctgcgtcgtcccgcgcgctttcccttcgagggtgtagccggcgatatgcgcggtaccgatatccactcgcttgagaagctcaacgtttagatccggctccggctcccagacgtccaataccacactcagcggctgaccagcttccagccgctttagcagtgcggcgttatcgaccaccggcccgcggcaggcgttgatcaaaatcgttccaggcttcaggcggcttatcagcgcctcatccgccagatgcagggttttatattgcccttctttatacagcggcgtatggaaggtgatgacatcggcttcctggaccagcgcctcgagggagcggaagtcaccttcgtcgccgcgatcggcgcgcggtgggtcgcagagcagagttttgatccccaacgcttccaggcgcttttgcagtcgcccgccaacgttaccgacgccgacgatcccgacggtgcgatcgcgcagcgcaaagccgtcgcgttcagccagcatcagcagcgatgaaaagacgtactctaccaccgcaatggcgttacagccaggcgccgcagagaaaccaatccccgcctgctgcagccacgcctgatcgacgtgatcggtgccggcggtagcggtgccgacgaacttaatggccttgccggcgagcaatgcttcattgacccgggtgaccgagcgcaccattagggcatccgcatcggtcagggcatcggccgggaccggacggcctgggatcgcctgcacgtcgcctaaacggctaaaaagctcacgggcatagggcatattttcatcaacgaggattttcacagttcagtacctgtctgagaacgagagttaactggggaagtgtgccataatctggccgccaggcatactcatcacctggttccagcaccgcgatatcgaaaggatgaatcatgacgcacccccttgctgatatgccagaccgtcctccagggcgaggcccatcaggcactgccgccaccggcgaaccttcgctttccatgcagcaacgcaccgttctggagcgactgatcacgcgcctggtggcgctgacctcgcagcagaacgcggaagtgtgggcctgcgtcaaacatgacctcggactgaaaggcgactcgcccctgctggcctgccatttcagcgccgcggaggccagtctcaaccagcgcttagccgccgctcaggataatcatcatcatcgccagaccttagcgcagctcagcgatctgctcggtcagggcaataaccgccaggcggtgagcgattatattcgtcagcattatgggcaaacggcgctgcatgcccttagccagacgcagctggagaccattctgcatctgctgcagcatggccagctgtcgatcccgcagccgcagcagcgcccgccgaccctgcgcccgctgttgccagccgagcataatacgctcaatcagctggtgactaagctggcggccgccaccggcgaaccaagcaagctgatttggcaatccatgctggagctttgcggcgtcaagtccggggagctgatcccggcgacgcacttcctgccgctttcgtactggctgcaggcgcggcaaacgctgagtgcgcaaagcgcgccgacgctcacctcgctgcagggagcgctcaagcagccgctggaggccgcggagtggcagacaattgtcgactttgcccgtcgcagctggcaggtcacgccgcggaccacgctgagcccggcgcagatcctggcgctgctgaacaaggtgtttgtgctgcgggtggcccgcgcccaggagacgctggccatcccgcaggaggagcctgtcgccaggcggacgtggagcgctaagccgtggcagctggcgctgggcgcggttgtcctgctccttgtgctgtggctcctgctgtagtccagcagccaccggcggcgtttacggctccccttcatgccaaacgccgcggtgtttcctacagcgttttcaggccggacaataacctagcggcgaaatgagataagggtgacgaggatccccagcgccgcgcagagggcgccggcaaggaacaccgacgagtagcccagcgaggtcgccagcaggccggtcagcggcccggtcaggccataggagatgtcctgaaaggccgcatagccgccgagcgcggtgccgcgcacctgcgccgggacgcgcttcactacttccacgccaagtgaggggaaaataagcgaacagccgcacccggtcagcgccgcaccggccagcgccagccaggcattcgccgccagtcccagcagcgtcagaccaaccgcctctatcagcagcgagaccatcgccaccttaacgccgccaaaccgatccggcatccagccgaacagcactcgcatcagcacaaaggcgccaccaaacgccgtcagggtaaagccggccattggccagctatggctggcgaaatagagggagacaaaggtgccgatcaccgcaaagccgacaccctgcaggcccaggccaatacccgggcgccagatcatgccgatgacgctccagagtgaaggccgctcgcctccgtgggccgccactttgcgcacggtaccgttaataagccaggcgacgagcggtagtcccatggtgacacaggccagcaccgccacgccaaaatggctatagatcaataatcccagcggggcgcccaccgccagcgagccgtacatcgccatgccgttccatgacatcactttgccggaacgggccggtcccaccaggcccatcccccagctcaggtttccggtcagcagctggctttcgccaaacccgaggatcaagcggcccagcagcagcaggccgagcctggcgagcaccggcagcggcagcagcgcagcggccagccatgccgcgcccgccagggcgcaggccagcatcccctgcaggacggaacgtttagcgccgtactggtctgccagacgtccggcgtacccccgggtcagaacggtggcgaggaactggatccctaccgccacgccaaccacggtgttgccaaatcccagctcctgatggacaaagagcgggatcaccggcagcggcaaaccaacggtcatataggtcaaaaagacggcaaacgtaatacggaaaagcgaaaaattcgccgaagaattggatgttgtttcagtaactgcggacatgcattactccagattcgcagagtaaggcgagcaaagcgacacgccccctccacctgattatcagggttaaggcgcgttggttgacgttaaacgcttacgcattagtggagagactaatggatccgcgagcagtgtgcctgcgggctcttaccctgtcaagatgacaaaaaaggggagccggtggctcccctttgcgcatcacatgctgattaggcgttgtatttacgcatcaccagcgtggcgttggtgccgccgaagccgaagctgttggacattacggtggtcagcttagcgtccgtcggtttggtgacgatgttcaggccggcagcctgctcgtcgagctcttcaacgttgatgctcggcgcgataaagccgtgctccagcatcagcagggagtaaatggcttcctgtacgcccgccgcgcccagcgagtggccggtcatcgctttagttgccgaaatagccgggctgttgtcgccgaatacttcgcggatggcgcccagctctttcacgtcgccgaccggagtggaggtaccgtgggagttcagatagtcgatcggcgtatcaacgccatgcatcgccatctgcatgcagcgcactgcgccttcaccagacggggcgaccatgtccgcgccatcggaggtcgcgccatagccgacgatttcggcatagatgtgcgcgccacgcgccagggcgtgttccagctcttccaccacgaccataccgccgccgccggcgataacgaagccgtcacggttagcatcataggtacgggacgctttttccggggtgtcgttgtatttagtggacagcgcgcccatggcgtcgaattcgcaggccatttcccagcacagctcttcgccgccgccggcaaagacgatgtcctgtttgcccagctggatctgctctaccgcgttaccaatacagtgggcggaagtggcgcaggccgagctgatggagtagttaacgccgtgaattttgaacggtgtagcgaggcaggcggaaacgccggaagccatcgctttggtgaccacatacgggcccacggctttcagaccacgcgggctacgcatggcatcggcgccgaagacctggaatttcggggaaccgccgccggagcctgcgatcaggccgacacgcgggttattctgatatgcttcaggcgccagacctgcgtcggcaacagcctgttccatggacaggtaagcatagatggaggcgtcgctcataaagcgcactactttgcggtcaatgaggccagtggtatccagtttgacgttgccccatacgtggctgcgcatccctgaatctttaagctcctgagagaaagtgatccctgaacgtccttcacgcagagatgccaggacttcctgctggttattaccgatgctggaaacgatgcccaagccagtaatcactgcacgtttcattaaatacctctgtaagtcgcactattttaagtttcgtgtcgcacaatagcgtacacttgtacgccgaacaagtccgatcagacattttgtgtataaatttgcgccctcaggcacacatcgttaagatcgtgctacgccttgtgattcgagtaacttacgtgaaacaaaacgccatacaacccgccaacctggaattcaacgctgagggtacacctgtttcccgagatttcgacgatgtttacttttccaatgacaacggtctggaagagactcgctacgtttttctcggcggaaatcgcctgccggagcgcttccccagccaccctcgcccgctgatgatcgtcgcggagagcggcttcggcaccgggctcaatttcctcaccctctggcaggcatttgacgtttttgttcgtgataacccgaacgttaccttgcaaaggttacatttcatcagttttgaaaaatatccgctgaaggctgaggatctccgcctggcgcaccagcgctggccagagctggctccgtgggcgcagcagctgcaggcgcaatggccgtcggccttcggcgggtgccatcgtctgctgctcgacggcgggcgggtgacgctcgatctgtggtttggcgatatcaatgagctgaccagggagctggatgattcgctgaaccagcaggtggacgcctggtttcttgacggctttgccccggcgaaaaatcccgacatgtggactcaggatctgttcagcgccatggcgcgcctggcgcgacccggcgggacgctggccacctttacctccgccggttttgtccgccgtggcctgcaggaggccggctttaccatgcgtaaaagcaaaggcttcggccgcaagcgggagatgctgaccggcgagatggcgcaaacgctgagctttcctgcgcgcgtcccctggttcgctcgcagtagcagcgatgcccgcgaggcggccatcatcggcggcgggatcgccagcgccctgctctccctggcgctgctgcgccgcggctggcaggtgaccctttactgcgccgatgaggctccagcgcagggcgcctccggcaatcgccagggcgcgctgtatccgctgttaagtcagcacgatccggcgctggcacgcttttttccggccgcctttaccttcgcccgccgaatgtatgacgcgctgccggtgatgttcgatcaccaatggtgcggtgttacccagctcggctgggatgagaaaagcacgcataaaatcgcccagatgctggcgctgaatttacccccggacatcgcctgcgcggtgacggcggaacaggttgccgggctgaccggcgtcgataccggctgcggcggcatcacctatccggccggcggctggctgtgcccgcagcagctcaccgccgagctgctggcgctggcggccacgcgcggactgcacgtgcactatggttatcccgtcgaaacgctcagcgcggagggcgatggctggctgctcaatcagcagcgctatcatcaggcggtggttctggcgaacggccaccgcatcactggttttgcgcaaaccgcccaactgccggtctacccggttggcggccaggtcagccatattcccaccaccccgcggcttgccgccctgcgccaggtgctgtgctacgacggctacctgacgccacagaatccgcaaaatcagcagcactgcattggcgccagctaccaccgcgggaataccgacaccaccttcagcgaagaagatcagcagcacaaccggcaacggctgatcgactgcttcccgggcgcggagtggccacaggacgtggatatcagcgccaacgacgctcgctgcggcgtgcgctgcgccacccgcgatcatctaccgatggtcggcaacgtgccggactacgcggcaacattgacgcaatacgccagcctccacgaacaaccggatatcgccgatagcgcgccggtctgtcgtaacctgtttatgcttggcgcgctcgggtcgcgcggactttgcaccgcgccgttaagcgctgagctgctggcggcgcaaatgagcgcggaaccgctgccgctggatagcgacaccctggcggcgctgaatccgaatcggctgtgggtgagaaaactgctgaagggaaaagcggtgaaataaaaccatgagggcaggcaatttcccgggtacggctgacgcctgacccgggctacaacatggctcaggcctgatttttcgcctgttgatacaggttatgccacatcccctgcaccagaatttggtccggcggcgacagttcgccagcgctgatggctttctccaggctctggctaactctgctgtgtaccgcgtcagcagaatgctcgccctcaccttccagctcagccaccgccagcgtcaggtggccgcgcagataaccgccggcaaacagttcatcatcactggcgtggtctaccatgttgtcaatcagcgccagaatgcgtgattcaaactccgcgatcatcatcttacctcttgtcatgtaatgtgcggccttagtgcaggtcttccggccacggaaagtgttccgccgtcaatggcggcgtttgataatagtgttgtaacgcgcgaataaagcgcgccggacgttcggggatcccttgttcaagtaaagtcatcacccgagcatgcacccggcgctggaaggcgatgcgatcgggctcaacgtccccttccagattgtcacagctgacgttaaacggaaatcccgccgccacgcagaacagcaactcaaaggcctgcggtttcacctcgacatcctcaaactggctttgggtcattgcatcgcggccgtccgggcagtaccagtagccaaaatctacttgttcgcgacgcgccttgccggcgacacaccagtgagagatctcgtgcagggcgctggcaaaaaatccgtgcgcaaacacgatacggtgatagggcgtttcatcgtcagccggaaggtagatcggctcatcgtcgcctttaatcaggcgggtattaaattcttcggcaaagcagctgtcgaaaaggtctatcagctgctgataatggtgttgctgttgcattaatgaattcccaaccactgcaaaatctcagccccgtggctgtcataaagaagtttcgcgctcatcaccgccgagacgataacgatcatcggccggatcagcgactgccctttactcagcaccagccgggacccggcgcgggcgccaataaactggccggccatcatcacaaagccggtggcccagataacctttccaccgatgataaacagcagcaggccgccgacgtttgaggtggcgttcagcagcttggcatgggccgtcgacttggcaaggttaaacccggccagagtgacaaaagccagggcgtaaaacgaaccggcgccggggccgaaaaagccatcgtaaaaccctacgctaccgccggcgaccagcgcaaacggcagaccgtaaagccgacgctgccggtcggcttcgcccagtttcggcatcagcaggaaataaaggccgatgccaatcaccagcaacggcaggatctgcttcagaatatcggattgcacgtgctgcaccagcagcgctccggcggttgagccgataaaggtcatcagaatattcagcttctgatcggccagattaaccaccttgcggcggacaaaatagagggtcgccgatagcgacccgccgcaggcctgcagcttattggtcgccagcgcctgggctggcggcatgccggccgccatcagcgcagggacagtcaataagcccccgcctcccgccagtgagtcaataaaaccggccaggatggcgacaaagaagagtaccaccagcaccagcggcgatacggcaaacaactcgataaaactatccattacagcacatgctcatccagtagcgcctggcaggaaggcggcagcggcggcggcgtcttcttcacagggggggtagacccgggtttaggtggttcgaaccagctctgcagctccgctccgcagccatcgccgggcggcggcggcgcctgatcctcgcactccagacttcccgccgggcaacgcagtcggacatgcatatgagcgcgatgctggaaccagggacggactttacgcagccactggcggtcgctgcccgcgtccaggcacagctgctgtttaatcgccgggttgacgaagatgcgggtaacttcgctatcttccgccgccagcttgataagctggctgatttgcgggctccatagcgacggcaccacatgcttgccatcgctggcgaccaggtccagcgcctgcggcttcaacagctgggacgatgtccagcgcgtttgcggcagctgaaggaagatatcgacatcgaggcccgtctggtggctggcgtgcccgccgttaaagcgcccgcccgccggcatccccatgtcgccaatcagcacggttcccattcctttattgtgcacctgattactcaggcgctgaataaactgaaccagatccggatgaccgaagtagcgacgctgatcggtacgcatcacctgatagccgggggcactcagggggagcgcctcggcgccaacgatacagccattggaaaacgcgccgattgactgggcgctgccgccgatcggttgggttattttctgccatggcgtggcggccaggctaccggcgctggccaacagcgcaagcagtgcgataacggtgtttttcatggttaccagcgtggaattgtcgtcgtcacgtcgccattctgcgcgcgctgacgcataaagtgatccatcagaacgatcgccagcatcgcctcagcgatcggtacggcgcggatgccgacgcacggatcgtgacgccctttggtgatcatctccacttcttcgccaaagcgattaatcgtatgaccgggaacggtaatactggaggtaggcttcagcgcgatgttggcaacgatctgctggccgctgctgataccgccaagaatgccgccggcgtggttgctctggaacccggctttagtgatctcatcgcggttttcgctgccgcgcagcttcaccacctcgaagccgtcgccaatttccacccctttcacggcgttgatgctcatcagcgcgtgggcgatatcggcatccaggcggtcgaagaccggctcgccgaggcctggcggtacgccgtcagccaccaccgtcactttcgcgccaatggagtcgccctcttttttcaggccgcgcatcagttcatccagggcgtcgattttatccgggtccggacagaagaaggggttctgctcaacctgatcccagtctttgatggccagcggaatatcgcccatctgcgtcaggcagccgcgaatgacgataccgaacttcgcggcaaggtattttttggcaatcgccccggccgctacgcgcatcgcggtttcgcgcgcagaagaacgaccgccgccgcgatagtcgcgcagaccatacttttgctcgtaggtgtaatcggcgtgtcccggacggaacagatctttgatcgcgccgtaatcctgcgaacgctgatcggtgttctcaatcagcagaccgatactggtcccggtggtaacgccttcgaagacgccggagaggattttgacctgatccggctcgcgacgctgcgtggtataacgcgaggtacccgggcgacgacgatcgaggtcgtgctgcaggtcggcttcggtcagcgggatgcccggcggcacgccgtcaacgatgcagcccagcgccagaccgtgcgattcgccgaaggtagtgacgcgaaagagttgtccaattgtatttcctgccatcacggctccaatctttttcgttatgttggcgtgttgtttttttagtctttataaataccgaagtgcgcacgggcgtcaatcagctgctgtttggtcagcataaagaccccgtcgccgccgttatcaaactcaagccaggtaaacggcacgtccggatactgctccatcagatgtaccatgctgttaccgacttcacaaatcagaatcccgtcgtcgctgagataatccggcgcgttgccgaggatacggcgcgttagcttcaggccgtcgcttccggaggccagccccagcaccggctcatgctcatactcttccggcagatcggccatgtcctcttcatcgacatacggcggattggtgacgatcagatcgtactgcagcttcggcagatcgcggaacaggtcggaacggatcggcgtcacgtgatggatcaggccgtgggactcaacgttgtgctcggcgacggccagcgcgtccggggagatatctaccgcatcgacttccgcctccgggaaggcataggcgcaggcgatggcgatgcagccgctaccggtgcacatatcaaggatgtgctgcggcttatggttaatcagtccggcaaactggttattgatcagttcgccaatcggggagcgcggcaccagcacccgctcatcaacgtaaaactcatggccgcagaaccacgctttgttggtcagataggcgacgggaatacgctcgttcacgcggcgaatcacccgctctacaatgcggtgtttctcgctggaggtcaggcgcgcagtgcgcatgtcttccgggatatccagcggcagatacagtgaaggcagcaccagctgtaccgcctcgtcccacgggttatcagtcccgtgaccgtaccagatattagcagcgctgaaacggcttaccgcccagcgcagcatgtcctgaatggtatgcagctcattgactgcctcatcaacaaaaattttatccacgacatcctccagggcacactctgctataaattcggcggctagtgtgccatgaagacggcgataaatcagcattcttgcgataaggggcgggggaaaaaacaggttttccttgcccgaagggatattgagtcgggtaaactagcgcaaagtatgaatgagagcggacaatgaaaaagaagacatcgcttagcgaggaggatcaggcgctgttccgtcagctgatgaccggcacgcggaagatcaaacaggacactattgttcaccgcccgcagcgcaagaaaattaccgaggttgctcctaagcgtttgctgcaggaacaggtcgataacagccactatttttccgatgagtttcaaccgctactgaataccgaaggctcgacgaaatatgtccgccccgacgtcagccatttcgagctgaaaaagctgcgccgtggagattattcgccggagctgttcctcgatctgcatgggcttacccagcagcaggccaaacaggaactgggcgcgctaattgccgcctgccgccgcgagcatgtgttttgcgcctgcgtgatgcacggacatgggaaacacatcctcaaacagcaaaccccgctgtggctggcgcaacatccgcatattatggcgtttcaccaggcaccaaaagagtacggcggtgacgccgcactgctgatattgattgaggtcgaggagtggcaaccgccggagctgccgtaacggcgggctccggggggccgtcagatggcgttggccatcttgaggttgcaggggcttttctgccagaggaactcacctttgccgtcggcatccagcgtcacgcaggcgatagccgaggtggtgaacatcgggggcgtttcccccggacacagctctgagaccagataccccaccagcggcaggtgggagacaaccagcgccgtcgccacgccttcattcgccagcgcctgcagataggcgctcaccattcccacatcaccgcacggcgtgagctccggcatcacgtcgacatgtttcggcaggttcatgcactccccaacaatatccagcgtctgttctgcacgcagatagggactgacaagaacgcgctcaatatccactttttgacctttcagccaggttgccatctgacgagactcatcacaaccgcatacggttaatggacgaaccgagtcactggctgcatcgagggcagcgtcgccgtgacgcataataaaaacttgcatattgcaccgcttttgttaaccagaagcaccgtagtttggcctgcgaagacaatacgcaggtgacccggtggccgggcattgtgcctgatccattccacgaatgaaacgctgttttttacctcaatggcgtaagtatagtcaatcattgtttacaaaacagccaatcaacagcgtcgtccgcagccggatttaccttctttgaccacaacttaggtcagccgttcatccgctggccaaaaggtggtcccctgttcggccatgcgtaataaagtgtcacagggtgtaaaacgtgggccgaactgggcggccaggcgctgcaggatcgcggcaacttcacccgcgccgatagtatccatataccggaacgggccgccaagaaatggcggaaaccctataccaaagacggcgccgatatcgccatcgcgcgcgctccggataatctgctcatcaaagcagcgcgccgcttcgttaagcatcatcatcacacagcgctccgccacctgctgcgcggagagccgcgactgcgggcggccgatgccgagcagcggatagactgccgggtcgggccgttttttgcttttacgcccttttgtctcataaagatagaaaccacgattattttttctgcctttgcgatcgtccttcaaaatcgcgtcaatgatgtttgcaggcgggctaaaacgttctccaaacgcgctctccagcacagggataattttggtgccggtatcgatacccacctcatccagcagttgaatcggccccaccgggaaaccgaatttaaccaacgcgttatcaatgacttcaatcggttcgccttccaccagcaggcgcatcgcttcattgatatacggcgcgaggatacggttcacatagaaccccgctttatctgcgacaacaatcggcgttttcccctgccgtttagccagctgcaccacggtggcgatagtctgcgggtcggttcccttgtgcgggatcatctcaaccagcggcattttttccaccggactgaaaaaatgcaggccgattacctgccccgggcggctggcgtgagcggcaatatcgccgattggcaacgatgaggtattcgacgcaaagatggtctgcggcccgccgtattgttccacttcgctgaccatccgctgtttgagagccaggtcttcaaataccgcctcgatcaccacatcgcgatgagcaaagccctgatagtcggtagtgccggagatcagcgccatctgacgatcgcgctccactgggcgcagtcgacgctgacgaacctgtttattcagcagatcccagctgtactttaaggcgtggttgatgccacgcggctggatatctttaatccgcaccggcagcccacccttacaggcggtcacataggcgatccccccgcccatcaagccaccgcccagtactgcaacgcttctcagcgaaccggggcccgcctcggcgccagggtcttttttcagatcggtactggcaaagaagatcgatcgcagcgcctgcgactgagggctcatcgccagttcgccaaatgcgcgcgcctcttcagcgtatccgctgctgcagccatgggccagaccattctcgacgacctgcaagattcgcttcaccgccgggtaatttccctgcgttttgcgctgcgtttgtttaccgacaaactggaataacagatggcgccccaggggccctgccagtacgcgttcacgaacaggcacctcccggctggtcggtcgtcccttcagcgccagctccaccgccgcctgcagtaaaatcgcctgcggcaccacctcgtccaccagaccggccttcagcgcctgtcgcggccgcagctgcttgccggtgagcatcatatccagcgcggtgctgaccccgatcagccgcggtaaacgctgcgtcccgccggaacccggcagcaggccaagctgtacctccggcaagccgagtcgggttttttcgtcatcgctacagatacggccatgacaggccagcgccagctccagaccgccgccaaggcaggcgccgtggatagcggcaatcaccgggatcgacaggccatggatctcagccataatctgctgtccctggcgcgccagcgcttccgcctcctgcgcgctgcggcagcgggcaatcatgttgatatcagcgccggcgataaagttatccgctttggcggagataaatactacgccgcgcactgacttatcgtcacgtaactggcgtatcaatccccgtacctgactgccaaattcggctttcagggtattcattttttcacccggggcatcaatggtgatcaccgcgattttgtccgcacggacctcaagcttaaaagcggaaacagtatccattattcagcctccacgatcatcgccgcacccagaccaccagccgcgcaggccgtcaccaaaccaaatcccccgccccgtcgccgcacctcatgcagcgtctgggtgatcatccgcgcgccggtggcggcgaaggggtgaccgtaggcgatagagccgccgaggacgttaaacttgctttcatctacctcaccggtggcctgcgagcggcccagcacctcgcgggcaaagcggtcgcttgccagacactggagattggccagcgtctgcgcggcgaaagcttcgtgcatatcgataagcgtgagatccgccagcgtcaggccagcgcgctccagcgccagcggcgtggaccacgcgggccccagcagcatatcctgccagacgtcgatggcggtaaaggcgtagctgcgcaaatagcccagcggcctcagccccagctctttagcccgcgactcggtcatcaggatcaccgctgccgcgccgtccgtcagcggcgtactgttggcggcggtgacggtgccatgtttgcggtcaaaggccgggcgtaacttctgataatctgcgagcgttgaatttttacgaatattgttgtcctgctcgagcggttcacggaaagggggagcataggcggtcatcacctctgcggacagtttaccctcttcccaggctttcgctgccagctggtgcgaacgatgcgccagggcatcctgttgctcgcgggagatcccccagcttttcgccatctgctcggcggtatcgcccatccgcaatccggttgaatattcagccaccgccggggggaccggcagcaggtcgcgtggccgcagacgggaaaacagcttcagcttttggctcagcgtgcgtgccttattggcatccactagcgtgcgggccagcgttttactgaccccaatgggcaggacagaggaggagtcggcgccgccggcaataccggcgcggatggtgccggccatcaggctttcagcgacgttcgccacggcctggaaactggtggcgcaggcgcggctgacgctataggcgtcggtatgtacgctcatgccggtacccagcacaatttcccgggcgatgttcggcgcttccggcatctgcaccacctggccaaagaccagttgctcgatgacttcggcaggaatgtcgctgcgcgccagcatctcgccaaccaccatttttcctaaatcaatggccggaacgccatgaaaagccgtagcctgacgagcaaatggcgtgcgtagccccgtgacaatggcaatgcgatcgccctgacgggtgataagcggtaatgcctgactcataacactcccctgttaaccaagacaaccaagtggtctgacctgataacattcttaactaattttttacattaagccaatcggagaagcgcaaaattgcgagccaaaacacagtgaaaagaaaaggaaacgccccttatcaggggcgtcgagggggaaggattaacgtaagcccagctggaagatcagggattctgcttcgcagctgaaaacaaaatcgatatccagctgcacaccgccgtcaacgtcagtgaaggttgggttaatttggcacggctcagattcgacattgcgggctttttcgcttaacgcggcgagcgtttgctcggcttcagcgcggttggcgaatacgcggctgtaggaggcggtgcagtcggtgttgtcaacaatcgtgccaacatccatacagcagcaaaccggggtttcatcagcgctacatttactcatcgtagatttcctctggagatgcaccttcggtgccagaaaaatgatgtacctattttacgccctgtccccggtgagcctccagccgagaatcgctctgccggcgttaagtgacagaaatcacacttaaaaatgatctaaaacaaaaatccccttctgtcccccttgctctctccgagatttttgccagctggatcgcgtttctgttatcacaattgaaaaacttcataaacatacttgcaacaaatcatctggtcagacctatactcagcgcactggtctgatttcttggttgtaccgcagaccctacactcccgcgcttctgttacggcatgtaacatagtttaaaaaaaaataactcaatgaggttatgggcatgagccagaaaacccgctttacccaatctgcccttgcagtggctgtcgcacttgtttccacccaggcctggtcagcaggcttccagctcaacgaattctctgcatcggggctgggtcgtgcctattccggtgaaggggcgatcgctgacgatgctggtaatgccagtcgtaacccggcattaattatgatgtttgaccgcccgaccatgtcggcgggcgccgtgtttgtcgacccgggcgttaatgtttcgggcacctctcccaccggcaagagcctgaaagcagacaatatcgccccgacggcgtgggtgcccaacttccactttgtcgcgccgattaacgaccaatttggttggggggcgtctatcacctctaactatggtctggcaacagagtataacgatgattatgcggccggcagcatgggcggtaaaaccgacctgaccaccgcgaacttcaacctgagcggcgcctaccgcctcgacagcaactggagcttcggcttaggctttgacgcggtctacgccaaggcgaagatcgagcgctatgcaggcgatctggggcagattgtcgcaggctctggcgcgctgccgccggcgctggcgggccaggtagcgaagatcccggccgacacgcagatcgcccatcttaatggcaacgcgtggggcttcggctggaatgccgggatcctctatgagctggataagaataaccgctacggtttaacctaccgttctgaggtcaagatcgacttcgacggtaactaccgcagcagcctgccggcggcctataaccagatcctcggcaacttcggcctgccggcgggcaccagcggccagacgacaaatggttcgctaacccttaacctgccggaaatgtgggagctgtccggctataaccgcgtggcgccgcagtgggcggtccactatagcctgacctacaccagctggagtcagttccaggagctgaaagccaccggcagcaacggccagacgctgttctataaagaggaaggcttcaaggacgcctatcgtcttgcgctggggaccacctattattatgacgataactggaccttccgtaccggtatcgccttcgatgacagcccggtgccggctaataaccgctctatctctattccggaccaggatcgcctgtggctgagcgcgggtaccacctacgcgttcaataaagatgcctcggttgacgtcggcgtttcatacatgcacgggcagcatgttgaaattaaggaaggcccgtataccttccgttccgaaggaaccgcctggctgtacggcgctaacttcaactaccgcttctgataagcagcgcgccacaaaaaagggtgaacattatgttcaccctttttttatcattcgccgatcactgtgaatcgatatccttcagctcatcctgaatagcctgagcattcgggttgtccgccggggtcagcttaccgccgttggcgataaagtcatgacgctggaagtaggcttcacgcatcagaatgtaagggtcggaagactggcgcagcaggccgtcggaatccagcagctgagcacgtgtctcaatcccttccaccgcccatttaccgatcgacatcggccaggtcagccaggagagcaccggatacaagccatcggccatatcgccgccttcgtcgcgcaaggtaaagcttccatagaacggcaactgaacatacgggccatagccaacgccataatgcccaagcgtactgccgaaacgatgtggctcaacccgctgtagctgcggattcgccatcccggccacatcgataagcccacccataccgagaatggtgttcaggaagaagcgggtaaaatgcaccatacctttataggggtcgccctgcaggaagtagttcaccatcactgccggctcttccaggttactggtaaaattgcttaacccgttgcgcgccggctgtgggacgtagtcgcgccatgccaccgcgacggggcgaagtacgtaaggatcaaccacgttaaagttgaagttaaacatcgtgcggttaaacccttctaacgggtctgagcgcccctgcggccgatcgccagagctggaactggcacatcccaccagcaatgtggcgccaagcgcaagcgccgacaggcgataattcatagatgtctccctggtttttatggctatcgcgagttgccatccatgacggaaagacaacgcttccgcccgtaaagatgtgagcgattgtaacagcacgttgaacgatgtctatatcacccaagttgttgatttgatcttagcctgggaataacgaaatcgcggggctcctattctaccggagcgacaaaaatctgacgttaccatttttgcgatttcagagtatgcccagccagacggcagggaaagccgctacgctataactatacagattgatagcgagggccacgaaatggatgaactagacaataacaaattaaaggcagaggatgacgaaagagaagtggaaagtgaggaaaatcagcgtggtgaagagatcgaagtaaatgaagatcgccttccctcgcgggcgatggcgatccatgaacatattcgccaggaaggggaaaaagagatggagcgcgatgcgctggccctgctatggtcagcgattgcggccggcctgtcgatgggggcctccttgctggcgaagggaatttttcacgtcaaactggaggggatcccgggcggttttttgctggaaaacctcggctacaccttcggctttattatcgtaattatggcccgccagcagctgttcactgaaaatacggtcaccgccgttctgccggtgatgcataatcccaccctcggtaacgtcggtttgctgatgcggctatggtcggtggtgctggcgggcaatctcatcggtaccgcggtggccgcatgggccttcaattatatgcctatttttgatgagccaacccgtcaggcctttgtcagcatcgccgaagacgtaatgaaaaacagtccgacagagatgttcgccaatgcgattatttccggctggctggtcgccaccatggtctggatgtttcctgtcgccggcgccgccaaaatcgtggtgattattctcatgacctggcttatcgccctggcggataccacccatattgtggtgggctcggtcgagatcctttatctggtgtttaatggaaatctgccctggagcgactttatctggccgttcgccctgccgaccctggcgggaaatatctgtggcgggaccttcatcttcgcactgctgagccatgcgcagatccgtaacgatatgagcagcaagcgaaaagcggaagcccgcgcccaggcggcggagaaagggaaaaaggccgaccgggcataaaaaaagcgccctgagtggcgagggtttaagcagtcagacggtatggctcttactcaggcgggcaaaaaacgctatactcgtgccgccttgtccccttagttaaatggatataacgagcccctcctaagggctagttgcaggttcgattcctgcaggggacaccatataaacgttgcccgccattcaccacgatgacctaaacgccagccagaacgtattcttctcgtaatcataattagccaacgatttcagtatggttagtcctgccagaaaggaacgtgtctttgtcaatcacgcacacaataaaccgacagcaacgcgcatttctgcgtacaataccttctgactttttcagtcactagccgcgaccttttacaaccttctctggacgatacaggagccaggcgttgatatgaaacagatcaccctcagcgatatgcagcagcagagcgaagcggcagccagtgctccgcgcctgcgtgcccatcgcaattttcatcccgaactaagcgacccgatacagcgtctggccatcgccatggaacccggcacctatatccgcccccaccggcacaggcatactttcgaacttttgctgccgctgaaaggccgttttgtggtactgaattttgatgaccacggcgtggttacccgccgggtggtgctgggtgaaacctgcacggcgctggaaatggaagccggtacctggcatacggtgctctcactcgaccctggcgggatggtatttgaagtcaaacaaggcgcttatcaaccgcttgccgaaatggacactatggcctgggcgcctgctgaaggccagccaggcactgccgaaatgatggcctggtatgccatcgcgcaaccgggtgaccgcttcctgtctatgccgcaataactacaggtaggttcgacaggcgccgcaggcgtctgtttgatacttcctgccgaccacaaagtttgccaaattgaccgtcccttttttcgtgctccgctcatactcaccttaaatattgctgctaaacaggaagaaacgcttatattcagcaaactatttttctctacgaataagagatgataagataacgggaaagagtaaatatgcggcagcaaaacaataaaaacagccaatttatcgatatattattctcaatgtgaatggattttgttaatcaggtaaaggaagtcagcagaaaaaataaatcattgtcattgatgcttttgctcaccatggcgatttattttttcatcgacatacaattcttatgaatattacagaacggaatatctggaagctaaataatttaccgccaatggagtattgctctctggcgcgggcgcaaaaattattaaactgcgaactggaagacattcttcactggcatgatattggcgcaatcaatctatgtcttaagcttaacccaacgccgggaatattaaaaatcgccgtcctctcccatcaggaaaaagaggtaaccagcgcgtttaatccatttacctcagtcgaggtaggagaaacagtctggtcgcaacactcccatatccgcagcattctgcgacttgaaggcgatattccgacgatggaaaccctgcgcggaaatacggtaacccagttcaacgtaaaggtatttgcttcagggctctggcatccacactgtcggaacctaatggcgctgctggaggcgccagatgatattcttttcgaaaaccgcctcagcatgatgctgccggataaaccatttgtttattgtcatttcattccagaggaagacgaacgcccctcgatatcattgaaccgcatctatatcaccagccaggccattgagaaaatatacgcccacagtattagcgcccggcctatggacgtgacgaaaaatccgctactggatcaaacccgttacatccagcaggaattaaccgtcctgccgcaaagtgaggtattgctggaatttatccattatcttgttcagtcccatactgtatttaatgagaagttgcagagtatggctgagccagacaagactcagctctttcatcacgtgctggaaaggcttaaggaagaaggcatgcttatagagaatgcccagcccgatgaaggcgatatcggcagcgaagccagccgtgagtcgcagttcgccggcgagtaacgtagtccttcaggcaagggactggcggctttcctgctcaatcgttatcgtgttctctcgggccagggtgatgaattcgcgcgctgcggcgctctgccaggcgccctgccgctgcaataaacaggccgtgcgctgcagcagcgcaggtcttagctcaatcgccaccacatcatcaaactgtccggcgatcgccgccggcagcagcgttgctaacgttgtgcttcgaataaccgacagaacggccccgatggagttggcctccatccgcacgtctggttcgagccgatgaaggcggcaataacgatcaatctgctcgcgggtagcaaactcgctgctcagtaaaattagcggctgggcgtcgagagccagcagttgcaagtcgcgctctcctgccagcggatgcgcacggctcaccaccagagcaagcgtttccgtcagcagcggctgaaccacaatttcctgtgaccggctgtcgtcaaaggcaatccccacatccagttcatcctccagcagcatcgcctccatccgctcctggttcatctcctggataagcacttttactccaggatagcgtcggtagtacgcctccatcagcgggcccagcatataggtagtgaaagttggcgtcatagcaatgcggagtttaccgtgctggagatcttctgcgtcatgcaaggcgcgccgaccttcctcaagctcgcgtaacgcgcgacgggcatactccagccagatctctccagcatcggtcaggcgaatacgtcggccagagcggtcgaaaagctgaacctccagcatcgcttccagctggcgtatctgctgtgacagcgcaggctgggagacatgcagcgccgcggcggcgcgggaaaagccacaatgttcagccacagcgataaagtaggaaagttggcgcagaagcatcggcccacctataagaaattccaataggcattatcataaataagtcttttaacttatgaaacaagagacgtaccctcttcgcacgaccctcaacatatttcacctttaacatcgttttatgcaggagtgactatgtccgctcacgatcgttatcttcagcgcgcattagtgctggcaaaacaaaacattgctgacggtgggcgccccttcggcgccgtgctggtgcggaatgatgagattgtcgctgaaagcgtcaatacctttcatctgagcggtgacccaacggcgcatgccgaactgaacgccgttcgcgatcttgccgccagactgggaagcgcggtgttgcgtgaatgcgtcatctatgccagcggacaaccttgccctatgtgcctgagcgcgctctatttaaccggcgtgcgggaagtgtttttcgccaatagcaatcaggacggggagccttttcagctctcgaccgccgcgatttatcagcagctgcagcagccgctggcccagcaaacgctgccgatccatcatcgcccgcagccggagggaactgaactttatcagcgctgggcggaacggcagtcatgacaccagcgctgcgacagaacctgacgctggcagtcctggtactgactgggatcaatatgcggccgctgcttacctccattggtcctttgctgccggacatccgcgcagccagcggcatgagctataccctggccgcactcctgaccgcgctgccggtgatcgcgatgggggtgctggcgctggccgctggctgggtcgatcgctatatcggtcaaaagcgcagtattgcgctgagtctgctgattatcgcggcaggcgccctgctgcgggaaatcgccccgaatagtggcttactgctcaccagcgctctggccggaggaattggcatcggcattattcaggccgccatcccggcggtaattaagcacctctttccccgacggacgccgctggtgatgggactatggtcagcggcgctgatgggcggcggcgggttaggcgccgcgttcaccccatggctggcgtcacatagcgcggtctggcatgatgcgctagcctggtgggcgctccctgcgctcctggctctgttcagctggctggcgatttgtcggcaattgcctcgcgcaccgcatcagaccagcgcttccccccgggtcgcgattattggccagcgccgcgcctggacgctgggactctatttcggactgatcaatgccggttacgccagcctgatcgcctggctgcctccttactacatccagctaggcgatagcgcccagtacagcggttcgctgctggcgctgctgaccgtcgggcaaaccgccggcgcgctgctgctcccggcgctggctcgccaggaggatcggcgccagcttcttctgctagcgctggcgctacagctgattggcttctgcggctttatctggctgccagagcatttctctgcgctctgggccattgcctgcggcgtggggttgggcggcgcgtttcctctgtgcctggtgctggcgctggatcacgccggacaaccggcggtggccggcaggctggtagcctttatgcaggggatcggatttatcatcgccggtctgtcgccctggctttcaggcctgctgcgtagcctgagcgggaactacacgcttgactggtcctggcatgcgatctgcgtcctgctactcatggcgctgacgctgcgctttatcccggcacactacccggccgagtggcgacagcgcgcctcagacctgccctgaaccgacggcggcgcgtggcaaagataatgccgcgcgctctcgttggccttctccgcccgccccatcgctaaaacccgtttccttcgcgtcgctggcgctaaatttattaccctgtgaaattaatgtgtcgccgaatcacgacactcgtaagtaactaaaaattaataaaaaaatgcctcttgtttccctgattttttaggcgtacattagcgccatctggagcactaaacgcacagaattacgggctgctgcagggtgaagttacacaggcggcagcccttgaaaaaacagaacaattaattcatttgaacgtcgcacaagcgcgtggagtgatgagtcgtgaaatacttttttatgggcctctcttttatggtcatcgtttgggccggtacttttgccctgatgatctagactgcagcggtgtcaaaaaaaacgggagccttcatgctcccgtttttattttgccgtgctgcccgcagcgctagctcgcggaggccagcagaccatccgcgcggaacatcgccttgataccgcggatcgcctggcgcgtacggtcccggttctcgatcagggcgaagcggacgtgggtatcaccatagtcgccaaagccaatccccggcgagacgcaaaccttcgcttcattaagcagctttttcgcaaactccagcgaccccatggcggcgtaaggttccggtattttcgcccacacgtacatagacgctttcggacactccaccatccagccggcctcatgaagccctttgaccagcacatcgcgacggcgcttatactgttcggcaatatcgcgcacgcactgctgatcgccctccagcgcagctatcgccgccacctgcagcggagtaaaagtcccgtagtcatgatagcttttgatacgagcgagggcattcaccaaagtcttattacccaccataaagccaatgcgccagccggccatgttatagcttttcgacagggtaaagaactcgacggcgacatcccgcgcgccgggcacctgcatgatggagggcgctttccagccgtcatacacgatatcggcataggccagatcgtggacgaccagaatgtcatactgcttcgccagagcgacaaccttttcaaagaaatccagttcgacgcactgcgcggtcggatttgagggaaagccaaggatcatcatcttcggcttcggatagctctcgcggatggcgcgttccagctcgttaaagaaatccaccccttccaccagcggcactgagcgtacctgcgccccggcaatcaccgcgccatagatatgaatcggatagctggggttcggcaccagtacggtgtcgccatgatccagcgtcgccagcatcaggtgcgccagcccctctttcgaaccaatggtgacgatcgcttccgattccggatcgatatcgacgttatagcgttcttcataccagcgtgaaatggcgcgacgcaggcgcgggatcccccgcgaggtagagtaaccatgggtgtcaggccgttgagcaacggtgcagagtttttccacgatatgcggcggcgtcgcgccatcgggattacccatactgaaatcgataatatcttcgccgcgccgacgcgcagccattttcagttcagcagtaatgttaaaaacgtacggagggagacgatcgatacgcgtaaaacggcgttcaggactggattcagccataggttcctctaattaacgttagcgcccggaccgtccgagcgacgctgccgctgttgcggctcgtttagaaaataacctgaaaaaattcatgttgtcgagaggcccgttaaaaaatattccctggcatataaaacgggtatcgactgtgctaaatgcggcagttcattggcggaataatcccgggttgtataaaggtggtaacacactgatatctttcttaacacagaatattatcgttaatggcgaagaccgccgctatcgcgatgctttttaattaatcccctttaaaaagtgcgacttttccgctttatggttccacggctggtcttctgccgtcaggttttttatcatgtccctttctggccactgacgcggcgcacccatgcacgaaatctttactatgatgctggcggtctatgatcgtgcggccctgatgcttatttgcctctttttccttattcgcctgcgcctgttccgcgaactgttgcataagtcggcccatactccgaaagagctgctggcggtgacagccattttctcgctgttcgcgctatttagtacctggtccggcgtcccggttgaggggtccctggtgaacgtgcgcattatcgccgtgatgtccggtgggatcctgtttggtccctgggtgggcgcgattgtcggggcgattgccggcgtgcaccgctatttgattgatatcgacggcgtgaccgcggtgccctgctttatcaccagcattgtcgccggcctgctgtcggggttgattaatcgtaaagtggcccgcgaacaacggtggaaaatcggcattctggcggggatgatgtgtgaaactctgaccatgatcctggtggtggtctgggcgccttccctgagtctcggcgtagatattgtttcgaaaattggtatcccgatgatcctcggcagcgtctgcatcggctttatcgtgctgctggtgcagagcgttgaaggggaaaaggaggccagcgcggcgcggcaggcgaaactggcgctcgatatcgccaacaaaaccctgccgctgtttcgacacgttaacagcgattctctgcgccaggtttgcgagattatccgccgcgacattaccgccgacgcggtggcgatcaccaataccgagcacgtgctggcctacgtgggcgtcggtgaagccaactatcaacgccacgacgatatgattagccccaccacccggcaggcgattcgttatgggaaaatcatcataaaaaacaatgacgaagcccaccgcaccccggagatccactccttgatggtgatcccgctgtgggaaaaaggggtggtgaccggcacgctaaaaatctattactgccacgcccatcgcatcacttcgacgctgcaggagatggcgattggcctgtcgcaaataatctccacccagctggaagtctcccgcgccgaacagctgcgggagatggccaacaaagcggagctgcgcgccctgcaaagcaaaattaacccgcattttttatttaatgcgctgaacgcgatctcctcctcgattcgccttaatccggacaccgcgcgccagctcatttttaatctgtcgcgctacctgcgctataacatcgaattaaaagacgatgagcagattgatatcaaacgagagctgtatcagatcaaagattatatcgctattgaacaggcgcgattcggcgacaagctgacggtcatctacgatattgacgacgacgtcagctgcgtgatcccgagcctgcttatccagccgctggtggaaaatgccatcgttcacggtattcaaccctgtaaaggcaaaggcgtggtgacgatcggcattaacgagtgcggcaatcgggtacgcatcagcgttcgcgatacgggcaacggtatcgatcccgccgtggtcgcccgcgtggaagccgatgagatgccgggtaacaaaatcggcctgctcaatgtgcatcatcgggtgaaacttctctacggcgagggtttgcatatccgcaatctgacgccgggaaccgaaattgccttttatgtccccaataactctacgccgcaggcgctgacggagtcgctgttgtcatgagcggagaaaagatgaaagttatcattgtggaggatgagtttctggcccagcaggagctctcctggcttattaacacccatagccagatggagatcgtcggcagctttgacgacggcctggacgtgctgaaatttctccagcacaacaaggtcgacgccatctttctcgatatcaatattccgtcgctcgacggggttctgctggcgcaaaacatcagccagtttgcccataaaccttttatcgtctttatcaccgcgtggaaagaacatgcggtggaagcctttgagctggaagcctttgactacatcctgaaaccctaccaggaatcgcgcatcatcaatatgctgcaaaagctgaccaccgcctggcagcagcaaaataacgctgcttcaggattagccagcgcggcgccacgggaaaacgacaccatcaatctgatcaaagatgagcggattatcgtcaccagtattcatgatatttattatgccgaggcgcatgaaaagatgacattcgtctatacccgccgggagtcattcgtcatgccgatgaacattactgaattctgcagcaaactgcccaccgcgcatttcttccgctgccaccgctcgtattgcgtaaatctcagcaaaattcgggaaattgagccgtggttcaacaacacctatgtgctgcgcctgcgtgacctggagtttcaggttccggtcagtcgcagtaaagtgaaagagtttcgccagctgatgaatctgtagagagcggaaagcgccgccatccgggctacgacggtagcccgggagaagaatgcttaaagcacctggcccagcgtctgacgcagatgcgcgccggagcccagcaggcctgggttatcatgcacgatcaggtaaaccgggatatcctgaacataagctttaaaacggcctttgtcttcaaaaccgccgcggaaaccagaggctttaaagaactccaggaagcgcggcacgatgccgccggcgatatacaccccgccaaacgtcccgagggtcagcgccaggttaccgccgaagcgtcccataatgacgcagaacagcgacagcgcccgacgacagtcggtgcagctgtccgccagcgctcgctcggtcacctcacgcggctgcaggttctccggcagtcggccgtccgatttgacaatcgcgcgatacaggttgaccagcccgggacctgagagcacgcgttctgcggaaacatgccccagctcggcgcgtagctcttccagaatgatcccttcttcttcgctgttcggggcaaaatcaacatgaccgccttcgcccggcaggctgacccaacgcttatcaacgtggaccagatgcgccacgccgagcccggtcccggcgccataaacggcgatcggtttgcccgctaccggcgcactgccgccaaactgaataaggtgctcagctttcagcatcggaatggccattgaaacagcggtaaaatcgttaattatctccagatgggcaaagccgaggttacgcttcatttcggcgatagagaaagcccaggtatggttggtcatcgccacccagtcgccggtaatcgggcatgcgatggcgatacaaccttcgttgaccgttacctgatgctcctcgagatagacgcgcaccactgcctccagactggggtaatcgagcccggaataggtctttgcgcgagagatctctccactcgccagatcacatagcgccaggcgggcgttggtccccccgacatctcctactaaagcaaattttgtcattccgttacggctccgctaaagtcaaaataaatcttttggcacactgtaaattcatggcggcttaacaacaacgtccaacgcgcagacgccccttgtttagcgacacaggtcacatttagtttgtaatctatgcaaggtagcctgtaaaggacgcgccggatatcagatgtcaccttaactttatcgtttcagcaccatttgcatcgacggtctccgctgacgaaggcaaagtagtgctccagcacttttacaaggacatttccatgctccatcctcgcgccagaacaatgctgatcctgtcggtgccggccatcctgataggtatcgcctgcagcctgatcctgatcgtggcgatgaaggttgccgcgctgctgcagcgcgtgctgtggagcaatctgcccgcgcagttaggggtgagcgccgacagcccgctgtggatcatcgccatgctgacggcgacaggcatcgcggtgggtctggtcattcgatacagccccgggcacgccgggccggatccagcgaccgagtcgttaatcggcgctcccattgccaccggcgcgctgcccggactcctggccgcgctgatcctcggcctcgccggcggcgtcagcctcggcccggagcatccgattatggtggtgaatatcgcgctggctgtcgccgtcggctcccgtctgtttccgcgcgtcagctcgctggactggaccatcctcgcggcctcaggcaccatcggtgccctcttcggtaccccggttgccgccgcgctgattttttcgcaaaccctcaatagcagcaacgatacgccactgtgggatcgcctctttgctcccctcctcgccgccgccgccggcgcgttgacgacgggtctgtttttccatccccatttttcgctgccgatcccgcactatggtcagatgcgcttcgttgatattctcagcggcattatcgtcgccctgatcgctatcgccgtcggcatggtggccgtctggtgtctgccgcgactgcatgccctgatgcatcggttgaaaaatccaatcctgaccctcggcatcggcgggctgctgctggggatcgtggggacgataggcgggcccttaacgctatttaaagggctggatgagatgcagcagctggccttcagccagacgctaaccgccgcggattttctgcttatcgcgctggtcaaactggcggccctggttcttgcctcagccagcggctttcgcggcgggcgaattttcccggcggtgttcgtcggggtagcgctggggctgatgctgcatgctcatgttgacgcggtgccggcggcaatcaccgtttcctgcgcgatcctcggcatggtgctggtcgtcactcgcgacggctggttgagcctgtttatggccgccgtggtggtcccggatactactctgctgccgctgttgtgtatggtgatgctcccggcctggctgctgctggccgggagaccgttgatgattgccaaacggcataccgattaaacgcggctgtttcgctcctcaagggcctgcgtcaccgcgcgcaggaaatcggggatatccattttcggcagcatcacttctaccagggtgagggtatcggaggtgatgctctccgtcatcgcctcccgcagttcagacgtctgagtgacccgccggcagcgcgaagcaacgtcaggggcgaaggcttccggcagccgctgccagtcccacagagcgatgtcattgtagcgctgctctggaccatgaatcgcccgttccacggtatacccttcgttattcagcagcagaataagcggcttttgcttatcacgcagcatggagcccatctcctgaatggtcagttgggccgcgccatcgccgacaattagcaccacccgccgctccgccgccgcggtttgtgcgccataggcggccgggagagtaaaaccaatcgagccccacagcggctggacgatcagcgatgcttcagagggcagcttcagcgccgcaataccaaaggcggccgtcccctgatcggcgagaataatatcccccggacgcagggcgccctgcaccgtcgcccagaaatttttctgggtcaactcgccttcagcgccctcctcagcctccggcgccacgacctgaggcgtagcccactccgccgccagcggggcggaaagcgtcatcagcgcggccagggccttatccatcggcaccccgctgaaccagtgatcgcccaccctgacggcgaagggctggatctcaatagtcttttcccgcgccagatgttgggtaaatcctgcggtgatggtgtcggtgaagcgcgtgccaatgcagatgatggtgtcggcgttttcaatcgcctcccgggtctgcggcgcgctggcaatcccgctgtaggtgccgacaaacccgctctgctgctcatcaaacaatcccttgcccatgagcatcgtcgcatgggcgacaggcgttttcgccacccactcccggagcgtcttctgcaggccataacgttgcgccaggaagtccgccagcagggaaatgcgtcggctgctccgcagcaggcggctggcatgttcgcagaacccggcaagctggttttcatccgccggagcgggctccaccagcaagcgctgggctggggcaatcgctgccgctctggcgacatcggctggcagcatcaaatagccggggcgatgatgcgtcaacatatcgcgcagcacacggtcgatttcatggcaggcgttgccggcggtcagcagcgcctggctacaggtgatctgctcgctcatgcgggcgaaatggcgaaaatcgccatcgccgagggtatggtgcagcagttcgccgcgctgctgggcgccggtagagggcgcaccgacaatatgcaataccggaatatgttccgcatagctacccgcaatgccgttcagcgcgctcaattcgccgacgccgtaagtggtcagcagcgcaccggcccctttgatgcgcgcatagccgtcagcggcatatgccgcattcagctcgttggcgcagccgacccaccccaaggcgctgtgcgcgatgacgcgatcgagaaactgtaagttgtaatctcccggcacgccgaacaagcgatcaataccgcagtcgacaaggcgatccagcagataatccccaatagtgtaggtcggttgcatatccattatcctcattttggtgcaggtgtaatttgagtattgaataagcgatccgcctgtccagatgggagctgataatggcagtgtaaagcaataattacgcagaaaaagcagtgtactccacgcagaacattgtttagtgtaaacgtatacacatcctgttttgtcggcggaggaagaatggtttaccaggcaagcaccacgcgatatcaaacgatggagtaccgtcgctgcggccgcagcggtctgcagctaccggctatttcccttggcctgtggcataactttggcgatgaaacgcgagtggaaaccagccggcagatgctcctgcacgcttttgacctcggtataacccatttcgatttggccaacaactatgggccgccgccgggctcggcggaaagcaactttggccgcatcctgaaagagtcgctcctgccttatcgcgatgagttaatcatctccactaaagcaggttacacgatgtgggacggcccttacggcgactggggatcgcgaaaatatctggtagccagtcttaaccagagccttaaacgcatggggctggaatacgtcgatattttttaccatcaccggcctgatccacagacgccgctgatggaaacgatgcgtgcgctcgatcatctggttcgtcagggtaaagcgctatatgtcgggatctccaactatcctctggcccaggcgcgggaggcggtgaagatccttaacgacctcggcaccccctgcatcatccaccagcctcgctactcgatgttcgaacgcggcgtggaagaaggactgctggattttctgcagacggaagggattggaagcatagcgttttcaccgctggccggtgggcaacttaccgaccgctatctcaacggcattccggccgactcgcgcgccgccagcagcagtcgttttctgcagccggagcaactgactccagcccgattagaaaaaattcgtcagcttaacaggcaggcggaagcgcgtgggcagaagctgtcgcagatggcgctggcctgggtgttgcgcgaagagaaagtcacctcggtgctgatcggcgccagcaaaaccgcgcaactggatgatgccgtcggcatgctgctgaatcgccatttcaccaccgaggagtgcgcggccatcgacgccatccttgcgctgtaaagcaaatgttactttagcaaaaagtgctctttcctgcgctttcggagttcgtccgatgcggcgggtctttaccgacccgtaatatcaggttaacaggccgcttacggccccgatcgtgaaggagaagagtatgttcaggtcactgattctggcagcagtactgctggccgcagggccactggtcgctaacgctggtgaaatcaccctgctgccatcggtaaaattacaaataggcgatcgtgacaattacggtaactactgggacggtggcagctggcgcgaccgtgattactggcgtcgtcactatgaatggcgtgataaccgttggcatcgtcatgacaacggctggcacaaaggctggtacaaaggcagagataaagcctgggagcgcggctatcgtgctggctggaacgaccgcgatgaccaccgcggcggctggggacgcggcccgggcgggcgcggtcacggtcatggacatggccatcactaacaaacgaaaaggggagcccatcggctcccctttactttattcagcatcaggaatcaattaatccaccccgagcagcgaccccactattaaccagccgttcaggctcaccacaatagcgactatcgcccagccgatgcctctcacccaacgggtattcaccaggtcccccatcagcttcgcattgctggtaaatatcagcagcggcaccagggcaagcgcaatgccaaagctgagcaacacctgactcattaccaggatgcgcgtaggatccagccccagcagaatgacgacaaacgacggcagcatggtgatcgcccggcgaaaccacagcggaatatgaaagcggataaacccctgcataacgacctgacctgccagagtgcccaccacggtcgacgataaaccggcggcaatcaggctgaggccaaagatggtcgccgccgcgtggctcagcagcggctccagcgtcatgtaggcctgatcgagatcggcgacgccggtatggccattaaagtggaatgccgccgcagcggtcgccatcatcgccagattgacgaacccggcaatggtcatggcgatcgccacatcccagcgggtcgcgttatagcgttcttttcgcgttccgccatgcagatgctgagtcagcgatgagtgtaagtaaatgacgtgcggcataatggtcgcccccagtaccccggcggctaagaataccgcctccccgttgggcagcgtggggatcaccagccctttcgtcagaggagccagcgcgggctgggaaaagatcaactccacgacataggccacggcgacaaacagcaacaatccaccgatcaccttctccagtggtttttgtccgcgccgctgcagcatcaggatcagaaaagtcgccaccccggtcagcaccgccccctgcagaagcgacacgccgagcaccagcttaaagccaattgcggcgccgataaattcagccagatcggtggccatagcgataatttccgcctgtacccagtaaaaccagacaacaggacgcgggtaatggtcgcggatctgctcggccaggtttttgccggtggcaatgcccagtttggcagaaagcacctggatcagcatcgccatcaggttagcccacaccacgacccacagcagctggtagccaaagctggcgccggcctgaatgttagtggcgaaattacccggatcgatatagccaatggcagcgacgaaagccgggcccattaaggcgagcttcaccttgcgcgcggcgcgactactgctattctcaacgcgactgctagtcatcttctgcctctggaaatatagcctttgctatgtttcatgctatcaaaatgcgaatgattatcaagttcatttagaatggagataatgattgctgtgatagaagggaacaatagctggccggaaatgaaatacgggcgtcagaaaacgagatccagcccgctattaagagtagtacaagaatgcaacttttaaaacctttacgtaacataacaaaagtggatgttggatcactatttttgccattggtcacagttccttgcaatagtgtgcaattgatctcgttttctttaaagccgttgcatagaatgtgcacggaaatttaacctgcctcatatttggagcaactatggaccgcgtcttgcattttgtcctcgcgatcgttgtggtggctatactggccctgttggtcagccatgaccgccaaaagatccgtattcgttatgttgttcaactgcttgtcattgaagtcctgctggcctggttcttcctcaactccgatattggtctgggttttgtgaaaggattttccgagatgtttgaaaaactcctcgggtttgccaacgaagggacaaacttcgtgttcggcggcatgaacgataaaggcctggccttcttcttcctcaaagttttgtgccctatcgtcttcatttcggctttgatcggcattttgcagcatattcgtatcctgccgattgtcattcgcgcgatcggtaccgtcctgtcgaaagttaacggcatgggcaagctggagtccttcaacgccgtgagctcgttgatcctcggccagtcggaaaactttatcgcgtataaagatattctcggcaaaatgtcgcgcaaccgcatgtacaccatggcggcgacggcgatgtccaccgtgtccatgtccatcgtaggcgcttacatgaccatgctgcagccaaagtatgtcgttgcggcgctggtgctcaacatgttcagcacctttatcgttctgtcattaattaacccttaccgcgtggaagagagcgaagaaaatctgcagatgtcgaatctgcacgaaggtcagagcttcttcgagatgctgggcgagtatattctggcaggttttaaagtcgcgattatcgtggcggcgatgttgatcggcttcatcgcgctgatctcggcgctgaatgccctgttcgccaccgtgaccggttggttcggctatagcatttccttccagggtatcctcggctatatcttctacccggtcgcctgggtgatgggtgtgccggcaagcgaagcgctgcaggtgggcagtattatggctaccaaactggtctccaatgaattcgtcgccatgatggatctgcagaaaattgcctcgacgctctcctcgcgcgcggaaggcattatctctatcttcctggtctccttcgccaacttctcatctatcggtattattgccggggcgatcaaaggtctgaacgaagaacagggcaacgtagtttctcgcttcggtctgaagctggtgtacggctccacgctggttagcgtgttgtccgcctcgattgcggcgctggttctgtaacagacgtcagtcatctgagccgggcaatgcccggcttttttttgcccgacattcacccagcggctgtggtttaccgatcagataaccctgcagataattcacgcccagctccagcaagcgcgctttttgcggttcgctttcgacatattccgccaccacgctcatctgtttcgcccgcgccatctcgacaatcgatttcaccatgatggcgtccagcgggtccgtgaggatgtcgcggacgaagcagccgtcaatcttaatgatatcggcctgtagatgtttcagacgttcatagttcgcatagccggtgccaaagtcatcaatagcgatggcgcagccaaacgcgcgcaacgcttcaagattttgccgactggtgtccgcattagagaaggcctgctcttcggtcacctcaatagttataagttctggcgagacgctatagcgttgaaacagcgcgataatctgccctgcgctgttcttttgcatcagagttgcaggcagcaggttgaccgagaagcgctggccgggatgcttatggagcatactgaacaaggtctccagcaccagcatgtcaaaacgttggctgaggttaaactgcacaatcagcggaatgaatcggtcgggcataatgacgctatcgccacagcgcatgcgcgtgaggatctcatgataaccctccccctccggattctgaatcggttgcgcatagagcatcagcgcgcgatctttgagcacttgcttgacgcgcattaggaggcgcacctgctcggtagtttgatccaccaccagatcctgctcctcgtccagcgccagcacccgacgttcactgcccgcctgttcggaaagccagcttagctggcccagcatctggtaaagtccctcaccctggccgtcatcgcggccccaggccgcgccaaactccaaatccagcggctgattgtgccagctgaactttttgtggttgaggaccgcgaccatgtgattcaagcgggacgacggctccggcccatcaagcacgaggatcagttcgctgcccggtacctggaagactttatccgccgctcccagcagcggttgcagcgcccgaataatctgccgtttacagtccacccccatcatcagaccataatgccgactgagaaagtcgagattatcaatacgcaggctgcagatagcctgctgaggacagctctgtaaatggctctccagcgcgcgcaggttaggcaagccggtcagcggatcctcttccgcctggctacgccagcggcgtttgttgcggtcgctgcgggcatagatgtcggccatataaaacaaacagatagtaaaggagatcagaaccgacagcacaaaggagagtgaatactcgctttgcaccccctggagaaagtttttgttatataccaccagcaaaaaggccgagacagaccatgaaatacgcaatagcgcatggcctattcgactgataccgataaagtagacaataaaaataaccggaactaaataaccggcaataaattcagactgatacggcgcacacaatagcgttaatatcaccgccaacgcgataaaccaatatagggtaaaggagcgatattgcggtgccagccacggtaaacattcctgctgccagaaacgtcgggcgtagcgcggactgataatcatccgcattggataataaagaaacgtcgtaaaaattaatgccgcactgattaaactttggatatctattacagtataaatcaacggcatactaccaaagtaactggtaatagctaatggaaacgcaaaatattgtccggcgagatacatggtgattttcaggagcaccggcgcgaagaagccgccccagaagatccgcgcccccatatgttttgccgttggaccgcagcgccagcgcttccccaccaacagtcgcagaatagcgcaggagacaaacacggcgaacagttgacaaaaaagtaagataaacgcctgcggcagcgttaatttaatgagaaaactattggtgatggcaaacgcgagaattaatggcgcaattgcatagcggccaaagataaaaataacagaaaacatcacgctgattggcagccaggcaatataaataaggttgccgtcaattatcgtttgcggtgaaataaaacgagccagcggaatagcgactaaacaaatgataaaggccaatagagtttttttgatattaatgttaattttatcaagcattattgttaattaaaactccagaaacctcatcacgtttaatgggggaaatgttatgttgcttatttagggcaggcaaggcgaattatcaggaaaaagtctgaaattactttcgattttaattgctggagattaactgacgtaaccagaaagtgctttacatgaaacccgctaaaaacaaaaacccccgccgaagcgagggttctgaattttggtggagctaagcgggatcgaaccgctgacctcttgcatgccatgcaagcgctctcccagctgagctatagccccacaggacttctttacgaaccaaatccgctgggtgcagaatttggtggagctaagcgggatcgaaccgctgacctcttgcatgccatgcaagcgctctcccagctgagctatagccccgtaacgtaaagcgtgtcgtgttgacgggcggcataatatgaattcctcgctcaggtgtcaacggcaaaattatccttcccgattcaatcgctgaaaaagcaggcaacttgctgacattgcgagccttatcgcagtcagaggttaaacaggtcaccttttcacgtaaaaggatgctataacatgggcagctaattcccatacttttactcaggaaatagtatgctcaaggaacgaatgacacctgaagaaattgcccatctaaccggctacagtcggcaaactatcaataagtgggtgcggaaagaaggctggcaaacctctccgcgacctggcgtccagggcggcaaagcgcgcctggtccatgtcaatgagcaagtcagggagtttatccgcagcgcccagcgcgtggcggagacgcccggcatctattctccccatgatagcgatctggaatcgctgctgctgaccctcagtaaagaactcacccccagcgagcagaagcagcttatgtctttgttgctgcgcgaggggatcaccgggttactgcttcggttagggatccgcgatcggtaaaccatgatgaaactgaaagataaaatgacgcccgcagagcttgccgactgcctggggctggccagacaaacgatcaatcgctgggttcgcgagaaacaatggcgcaccgaagcaatacccggcgttaaaggggggcgagcgcgactggtggttatcgaccaaccggtacgcgagtttctgaccaacatccctgccagacgccatctgcttaccgacaatcatctcgcggaatcgccaggtgcatacctggtcaatgaggcagacgcgatctggcggcaaatcacggaaaccctacagctgatgactccggcagaacagctgcagctccgcgatctgctggcccgggaagggattagcggttttcttgcccgcctcggcatcgccagtccggaataacagacaaaaaaaacggcagggtaacctgccgttgtttcagctgcgtcgccgtcaggacgcctggccttcgcgttcagcgataaaagccagcgctttattgatacgatctacgctacgggatttaccgatagcatggacagtaacgtctagcgcaggagattgccctgccccggtaaccgccacgcgcagcggcataccgactttacccatccccacctccagctcatcagcagttgcctgaatcgcgtgatggacgttttccgccgtccagtcgctaatcgccgccagcttatcgcgaaccatttccagcggctgacgcgccactggacgcagatgttttttcgcggcgtcggcatcgaattcagcgaactcttcatagaagtagcggcagctctgggccatctctttcagcgtcttgcaacgctcgcccagcagtttcaccagctcagccagctgcgggccgttgcgagtgtcgatattttcctgctcgatatgccactgcagatgcgttgccacatactccgccggcagggtattgatatagtgatgatttaaccacagcagtttatcggtgttaaaggcactggcggatttgctcaccgcgcccagcgagaagaactcaatcatctcttcgcgagtgaaaatctcctgatcgccatgagaccagcccaggcgcaccagatagttgagtagcgcttccggcaggtagccgtcgtcgcgatactgcatcacgctcactgcgccgtggcgcttggaaagttttttaccgtcatcgccgttgatcatcgacacgtgcgcataaaccggcaccggcgcattcagcgctttgaggatattgatctggcgcggcgtgttgttgatatgatcttcgccgcggatcacgtgagtgatcgccatatcccagtcatctaccaccacgcagaagttataggtcggggaaccatcggtacggcgaatgatcagatcgtccagttcctggttgctgaactcgataggtccgcggatctgatcgtcaaaaataaccgaaccttgctgcgggttggcgaaacgcacgacgcacggctcatcgtcagcatggtgctcgtggctatggcggcagcggccatcgtaacgcggcttctcacccttcgccatctgctcttcgcgcagcgcttccagacgttctttcgagcaatagcatttgtaagcggtaccggcttccagcatctcatcgattacgttgttataacgatcgaaacgtttggtctggaaataggggccttcgtcccattgcagattcagccagttcatgccatccatgatggcttcaattgcttccggggtggagcgttcgagatcggtgtcttcaatacgcagcacaaactcaccgccgtggttacgggcaaaaagccaggaatagagagcagtacgcgcaccgccaacgtgcagatagccggttgggcttggcgcgaagcgagttttgattttcatgaattggccttacgtttaataaagatgccgatagccggcaatgtccggtggaaattatgggtcaatattctaacaccgtgggctgattcctcaatgttgttcccatcggaacgtcacggtttgccatttttgtttataaatcatgctatggcgccggtttcgcgatcgctttgtttaattttacgacgaacgaacgaattctttagaaaaggcgttgactcattttcaactctccctataatgcgactccacacagcgggggtgattagctcagctgggagagcacctcccttacaaggagggggtcggcggttcgatcccgtcatcacccaccactacttaacgtagtctccgccgtgtagaacagaaaattgagaagtgggtgattagctcagctgggagagcacctcccttacaaggagggggtcggcggttcgatcccgtcatcacccaccactttctcgccagctggattttctgtcaaaatgtgaagtaccgaagtgggtgattagctcagctgggagagcacctcccttacaaggagggggtcggcggttcgatcccgtcatcacccaccacttcgggtcgttagctcagttggtagagcagttgacttttaatcaattggtcgcaggttcgaatcctgcacgacccaccaatgtaaaaaggcgccctaaaggcgcctttttgctatgcgcggaacatggccctgccacgagtccctccgcagcaatcccccctgtcagcgctgatatagcggatcttcaaccctggcggcggttaaattctccccttcttcacgcacaatttcccataacgcctgagcggcggtcgacagcgagcgatttttcctgcatgccagcatcagctgccgctccatcaccggagtcagccgtttcaccgtcagatggctcccctgcggtaacggtagcgccagcgccggcagaacgctgatgccaattcccgattctaccatcggaaacagcgttgccgggtggccaatctcctggacgatgttcgcccggatagccagtctgctgagggccgcatcgatcagcgggcggctgccggacgcataatcctgcaggattagcctttcatcctgcagcgcctgccacggcacttctgtcaggctggcaaaaggatgatcctcccggcagagcagcaaaaatggttccgccagaaccacttcacactgaaggtctgccgccgggcccggatcaatcacgatgccaaaatccacttccccctggcggatactctccagcacccactgctggggccgatcgtgcagcacaaaatcgatatcgggataacgacgattgctgtgagcaatacactgcggaataaggtgggcggaaatcgtctgactggcggcgaccttgacggtgccgctcagttgctggccaacccgcccggcgtcgcgcagggtaatcgtcaactcatcgagcaaacgttccagcctgcccgccagctgctgacccgcctcggtgagcaccacttcgcgagtagtacggtcgagcagacggacgccggtctgatgctccagctccttgacgctatggctgacggccgactgacttaagccaatcatctcccctgcccggctgaagcttctggcccgggcgacggtgacaaatacttttaactgacgcagagagtaattcatcttttttattcatgaatagatgcaataaatcaattttatttctcaaatgaaaaaaagcacaatagcgcatctcttttcaggagcgtttatgaaacttttccgtattctcgatccgtttacggcaacgctaatcaccgttgtcctgctggcctcattcttcccggcccgtggcgctttcgtccccttctttgaacatctgaccaccgccgccatcgcgctgctgttctttatgcatggcgctaaactctcccgggaggcgattatcgccggcggcagccactggcgtttgcatctctgggtgatgtgcagcacctttattctcttcccgctactcggggttctgtttgcctggtgggcgccggtgaatgtcgatccgatgctctacagcggctttatctatctatgcattctgccggccaccgtgcaatccgctatcgcctttacttcgctggccgggggcaacgtcgcggctgcggtttgctcagcctcggcctccagtctgctggggatctttgtttccccgctactggtgggggtcctgatgaaccttcacggcgcaggcggcagtctggagcaggtcggtaaaattatgctgcagctgctgctgcctttcgtgctcggtcacttatcgcggccgtggattggcgactgggtggcgaagcataagaagtggattggtaagaccgaccagacctcgattctgctggtggtttactccgcctttagcgaggcggtggtgaatggcatctggcataaagtcggtctgggatcgctgctgtttatcgtggtggtcagcctggtgctgctggccatcgtcatcgcggtcaacgtctttgtcgcccgccgctgcggctttaacaaagccgatgagattaccatcgtcttctgcggttcgaaaaagagcctggccaacggcattccgatggccaatattctcttcccgacctccatcctcggcatcatggtgctgccgttgatgatcttccaccaaatccagctgatggtctgcgcggtgctggcgcggcgctacaagcagcaaaccgatgcgcgtctcgctgaggaaaaggccaacgcggccaaagcctaacgcgctttcttcaggggctggaccagatcgctcagcccctcagttttaatcagcagggtcaacgccatcagctcgccaagatgcccggcagggaattgatccttacgcgcgaaccacaataaatactcttccgggacatcgattaagcgacgtcccttgtatttaccgaacggcatttcggtattggctatctcgaccagctgcgctttatccacgttattctcccagcagacgcatcatttcggcttcgtcaatcacctcgatgcccagctcctgcgctttcgccagcttagaccccgccgcttcgccggcaatcaccaggtcggttttcttcgacacgctgcctgccaccttcgcccccagcgccaccagacgcgctttggcgtcatcgcgcgacagctggctgaggctgccggtaaggaccacggttttgcctgcaaacgggctatcaatctcttccgccttcaccaccaccggcgcaggccagcgaaccccctccgccagcagttgcgcaatgacatcgcggttgctctcttcggcaaagaagttgaaggtatgggtagcgacgacgatgccgacatcagggactttctgtagctcctcaatggatgcctgctccagggcttcgagagtgccgaaatgcgccgccaggcccgccgccgtcgcttctcctacctcgcgaatacctaaggcgtagaggaagcgtgcgaaggtcgtctctttggctttctcgagggcgttgactacgttttgcgcggacttcggccccatccgatccagcccggtcagtttccccgccgtcagccggaacagatccgccggggtatggacgtactctttctccaccagctggtcgatgatcttgtcgcccatgccgtcaacgtcgagcgcgcgacgggagacgaagtgcttgagcgactctttgcgctgcgcgccgcagatcaggccgcccgtacagcgggctaccgcctcgccttccacccgttcaacgtctgactgacatacaggacagtgggtcgggaagacgacatcccgggcatccgccggacgctcggaaagcaccacgttaaccacctgcgggatcacatcgcctgcccggcgaatcaccaccttgtcgccgattttcaagcctaagcgttcaatttcatcggcattatgcagggtggcattgctcaccaacacgccggcaacatggaccggctccagacgcgccaccggcgtaatcgccccggtgcggcccacctggaactccacgtcccggacgaaggtcatctgctcctgtgccgggaacttaaaggccacggcccagcgcggcgcgcgggcgacgaaacccagctgttcctgcagcgccagcgaatcgactttgatcaccacgccatcaatgtcaaagcccaggtggggacgctcttcctcgactttacgatagtaagtaagcacttcctcgggggtatggcacagggtgacgcgatcgctcaccggcagcccccatgctttgaactgcagcaaccgagccgagtggctggccggcagctcgccgccctccagcacgcccacgccgtagcagaagaaagtaagcggtcgcttcgcagtgatgcgcggatcgagctggcgcagcgaacccgctgccgcattacgcgggttagcaaacactttcccgccggtgcggcgagcttcctcattgattttttcaaacccggcctgcgggaggaacacttccccacgtacctcaaggcgtgcaggaatattctcgccatgcagcttgagggggatggcgcgaatagttcgcacgttagaggtaatatcttcgccggtggtgccgtcgccgcgggttgccgcctgcaccaacacgccgttttcgtagagaatgctcaccgcgaggccgtcgagcttaagctcgcagcagtaggtaagatgatctgtgcttttcaggcgatcctgtacccgcttgttgaaggcgagaaagctctcttcgtcaaacacgttatccagcgacagcatcggcacttcatggcggatctggctaaaggcggtgagtggcgccgcccccaccctctgtgttggcgaatccggggtaatcagctccgggtgctggctctccagctcgcgcagcttgcgcatcaggcggtcatattccgcatccggcacttccggcgcgtccataacgtggtacagatattcatgatggcgaagcgtggttcgcagttcagtcagttgttgttcgattggttccatatcacaccatcaatgataaaaaacccccgacaggcgggggttgagaaggaattgagttaacgcggaacgtcaggcgttcgcgtctttcacttcgcgaatacgatcctggtattcacgcagtttttgcggcgtcatcatgcgacgctgatcgtcaagcaccacgccgcccacttcgtcagcgatatactgcgcagactgcagcatcagcttgaagttctgcaattcatcgccgtaggaagggacctgcataaagatagtcaccccaggggtcatcatatccgccatgctgtccggattgaaggttcccggtttcaccatgttggccagactgaacaacaccggaccgctgccgtccggacttaggtggcggtggaaaatattcatttcaccaaacttaaagccggcctgctggatactgttgatcagcacttcaccgttaagctgggcgccatgatgcgcggcgacgttcatcacaatgaccgtctctttgcgctctttcggctgcggcgcggcgggctgctgcggctctaccggctgcggttccgcgacggcgggctgcgacgcggcaacaggctgtggcgcaggctgctgcggggcggctggctgcggctgagcgacggtcggcgtcaccggttgcggcgcgacaggctgctgcacaacaggctgcggctggtgttgcggttgtacgggcggctgcgcaggttgcggctgttgccagccaggctgcggagccgcatgcggcgcaggctgttgctgcggtggaaccggggcctggcgcggcggctgcggcggctggcgaaccggttcttcaggacgcgcaggctgctgcatctggcgctcgtaaggcggctggtactggtgctgcggcgactgacgaggggcttcatgctccccatgcgcgccgtgcggggcgtgagtcaccggatgaacgcggacttctcctacgccttcaacattatcatcaaagtcgtcgttttccgactcatcgtcgcgcgacttcatacgtttcagtgggcgatcgcgaaacatcgaagaacgttctttacggctggtccagaaaccatgtaccagtaaagcgattatggcgatcgcgccaacaatgattaatatcagacgcaaatcctgcatcattatattctctgttgttctaacaccttgccaccacggcaaacatttactcactaagagtatttgccgattacctcaagtgcaagtgcgtcggtcgctttcaccacataaagatgaactaaatcgtgctttttgctgttttttcgaacatttcctaactggttattgtctgacgacccgataaaataagcgagcattcacaccggatgttaaaaaaggagcaatgcctggctatggtttcatcatccgcaccgaccccgcgcagcggcgtttattatttttcgcagggctggaaactcatcgggctgccgggcatacggcgttatgtcttcctgcctttactggttaacgtgctgctgatgggcgctgccttctggtggctgtttacccgtctcggcagctggatcccctcgctgatgagccatgtgccggactggctgcagtggctaaactacctgctgtggccggtggtagtgctctcaatcctgctggtgtttggctacttcttttcgacgatcgccaactggatagccgcgccgttcagcggcctgctggcggaacagctggaagcgcgcctgaccggcgctaccccgccggacgtcggcgtctttggcatcatgaaagatattccgcggattatgaagcgtgagtggcagaagctggcctggtatctgccgcgcgccatcgtgctgttgctgctctactttattcccggcgttggccagacggtagccccggtactctggttcctgttcagcgcatggatgctggcgattcaatactgtgattatccctttgataatcacaaggttcccttcaaaaccatgcgcgaagcgctgcgcagtcgcaaagtgatgaatatgcagtttggggcactcaccagcctgttcacaatgatcccggtgttaaacctggtgatccttccggtggctatctgcggcgccaccgccatgtgggtcgattgctatcgcgatagacacgccagctggaaatagcggtaacaccttcacttgggggcggcaaaggccgctcccttatatcgcgcttattccttcttgcttatcattatttcccttccgcatatagatatgctaaatccttacttccgcatattctttaagcgggtatgctgatgccgtacccccaaatttcatacagttaaggacgggccatgagtaagatttttgaagacaactccctgactatcggtcatacgccgctggtacgactgaaccgcatcggtaatggccgtatcctggcaaaggtagaatctcgtaacccgagctttagcgtaaaatgccgtatcggcgccaatatgatctgggatgctgaaaagcgcggcgttctgaaacctggcgtggaactggtcgagccgaccagcggcaacaccggtatcgccctcgcctacgtggcggcggcccgcggctacaaactgacgctaaccatgccggaaaccatgagcatcgagcgtcgtaagctgctgaaagccctgggcgccaacctggtgctgaccgaaggcgccaaaggcatgaaaggcgctatccagaaagcggaagagattgtcgccagcaacccggaacaattcctgctgctgcagcagttcagcaacccggctaacccggaaatccacgagaagactaccggcccggaaatctgggaagataccgatggtcaggtggatgtgtttatctccggcgtaggtaccggcggaacgctgaccggcgtcagccgctatatcaaaaacaccaaaggtaaaaaagatctgatcaccgtcgccgttgaaccgaccgattccccggtgatcgcccaggcgctggcgggggaagagctcaagccgggtccgcacaaaattcagggtatcggcgccggcttcattcctggcaacctggatctgaagctggtcgacaaagtgatcggcattaccaacgaggaagctatctccacggcgcgccgcctgatggaagaagaaggcatcctggcgggtatctcttccggggccgccgttgccgccgcgctgaagctgcaggaagatgaggcctttaccaataagaatattgtggttatcctgccttcctcaggtgagcgttatttaagcaccgcgctgttcgccgatctcttcactgagaaagagctgcaacagtagtgccagcttgtaaataatgtgtaaaaaagcaccttttcgggtgcttttttgtggcacacgtcaaagttttacccctcctggcattgattcacctcgtagggtctggtatttaaccagcacatttattttgatgcgcgaaattattcagaagaggatttccgccagctgaatcgattttatgatttggttcaagtcttcctttcgcggcataatgtttaatgacgtgctagacgtcaatggcccgcaggtcttcgcagcgccaggcgctgccgacgccaaggccggaaacgtaacgccggcgctaacaatacaggctaaagtcgagtcgttagactagactttaggtccacaacactaaacctataagttggggaaatataatgttccagcaagaagttaccattaccgctccgaacggtctgcacacccgccctgctgctcagtttgttaaagaagctaaaggcttcacttctgagatcactgtaacctccaacggcaaaagcgccagcgccaaaagcctgttcaaactgcagactctgggcctgacccagggcaccgtagtgaccctctccgctgaaggcgaagatgagcagaaagctgttgagcatctggttaaactgatggctgaactcgagtaagttcacgggttctttttcatatcagtcacaagtaaggtagggttatgatttcaggcattttagcatccccgggtatcgccttcggcaaagcattgctgctgaaggaagatgaaattgtcatcgaccggaagaaaatttctgccgataaggttgatcaggaagtcgaacgtttcctgagcggccgcgccaaggcctccgcccagctggaggtcatcaaaaccaaagctggtgaaactttcggtgaagaaaaagaagccatcttcgaagggcatattatgctgctggaagatgaggagcttgagcaggaaatcatagccctgattaaagataagcacatgactgccgacgcggcagccaatgaagttatcgacggtcaggccactgccctggaagagctggatgatgaatacctgaaagaacgtgcggctgacgtacgtgatatcggtaagcgcctgctgcgcaacatccttggtctggcaatcatcgatctgagtgcgattcaggatgaagtcatcctcgtcgccgccgatctgaccccgtctgaaaccgcacagctgaacctgaataaagtgctgggtttcatcaccgatgcgggcggtcgtacctcccacacctctatcatggcgcgttccctggaattgccggccatcgtgggcaccggcagcatcacggcgcaggtgaagaacggcgactatctgattctcgacgcggtgaacaaccaggttctgatcaacccgtctaacgagcaaattgaagcgctgcgtagtctgcaggctcaggttgcggaagaaaaagccgaactggcgaaactgaaagatctgccggcgattaccctcgacggccatcaggttgaagtctgcgccaacattggtaccgttcgcgatgtcgaaggtgctgagcgcaacggcgccgaaggcgtaggcctgtatcgtaccgaattcctgttcatggaccgtgacgcgctgccaactgaagaagaacagtttgcggcctataaagcggtggctgaggcctgtggctctcaggccgttatcgtccgtaccatggatatcggcggcgacaaagagctgccgtacatgaacttcccgaaagaagagaacccgttcctcggctggcgtgccgtgcgtattgcgatggatcgtaaagagatcctgcgcgaccaggttcgcgccatcctgcgtgcctccgctttcggtaagctgcgcattatgttcccgatgatcatctctgttgaagaagtgcgtgcgctgaagaaagagatcgaaatctacaaacaggaactgcgtgacgaaggtaaagcatttgacgaatccattgagatcggcgtgatggtggaaacaccggctgcggcgaccattgctcgtcatctggccaaagaagttgatttctttagtatcggcaccaatgatttaacgcaatatactctggcagttgaccgtggtaatgatatgatttcacatctttaccagccgatgtcaccgtctgtactgaatctgattaagcaagttattgatgcttctcacgctgaaggtaaatggactggcatgtgcggtgagcttgcgggcgatgaacgtgctacacttctgttgctgggtatggggctggacgaattctctatgagcgccatttccatcccgcgcatcaagaagattattcgtaatacgaacttcgaagatgcgaaagtattagcagagcaggctcttgctcaaccgacaacggacgagttaatgacgctggttaacaagttcattgaagaaaaaacaatctgctaatccacgagatgcgcggcccaaattactgcttaggagaagatcatgggtttgtttgataaattgaaatctctggtttctgatgacaagaaagacaccggaactattgagattgttgctcccctctccggtgagatcgtcaacattgaagacgtgccggatgtggtttttgcggaaaaaattgtgggcgatgggattgccatcaaaccgactggcaacaaaatggtcgcgccggtagacggtaccattggtaaaattttcgaaaccaaccacgcgttctctattgaatctgatagcggcatcgagctgttcgttcacttcggtattgataccgttgaactgaaaggcgaaggcttcaagcgcatcgctgaagaaggtcagcgcgtgaaagtcggcgatccggttatcgaatttgatctgccgctgctggaagagaaagccaagtcgactctgacgccggtggttatctccaacatggacgagatcaaagagctgatcaaactgtccggtagcgtgaccgtgggtgaaaccccggtaatccgcatcaagaagtaatgcttgctgcataaaaatggcgccgaaaggcgccattttttttataccgcgcaggttaccggtcgatagcacttctcgcgagacaagacgcgcaatccctccggggtgctctccagaattcgccgctcgctgtcagcgaccagcagttcgcactgatatccaccggccaggccgaacagcgaccgcgccacgcaggcatcctccagcgccgcctcacctgtcgtatcaaaatgaccaacaatgcgtccctgctggcggatcactaaccgatagcttttcatctgctttgctccagcggcggtaggatcaattcgtcacaaccctgggcggcagtccagttcatcacctccagcacgcgctgggcagcagcctgcgtcgctgcccccagcgccaggccggaaagcaacccgctcaccagctccgcgcagaacagatcgccggttccttttaagtctgtctccacccgcgggtgaaccaccacttccactgcatcggccgtcaccaccagcacattgatcgtcgaatcggcctctcccggcgcgctggtgatcaccacccatttgagggtgtccgacagcaggcttcgcgccgcggcgaccgcctcctgccgatcgcgacagcgctggccgctcagcgtctccagttcgaacagattgggggtgatcccttgcgccagcggcagcaggtgctgacgataggcgtccgggatctcagccttgacatagatgccgctgtcgacatcgccgatgaccggatccaccagaatgcataacccgggatggcgggcccgtacgcgcgtcagccactgcgccaggcgttcgatttgcacagcgctgcccatatagccggtggtgaccgcacgcagttcgcgcagcgcgtcgcgctcctccagcgcctgcagatacccgacaaaccactcttccggaataatgccgccatagaacgtctcataatggggcgtattactgaacagcaccgtcggcaccgccagcacgcgcagaccatgctgtttaatcgccggaaccgcgatgctgttgccgacgctgccatagactacctgcgactgcacggcgacgatatccacttccgacgcccggcttttgtcgtgaaagagcactgattgtatatcatcctgctggcccatcttttctccccccgctggacagcgggtcacgcactgattatgattcgtcctatgctaaattccattttgtcataggtcaataatgttagccggaaaaaccgccagcgaaatcttcgataacatccgccatctggtgcagagcggcgggttgcagcccggagaggttctgccgccggtacgtgaactcgccagccagcttgcagtgaatcgcaacactgtcgccgccgcctataaacggctggtgacctccgggctggccgtcagtcagggacgcaacggtacagccattaaagcgcgggacacactgccggcgctggagggaggtgacccaacgaccccgctgaacgatatctccagcggcaatccggatccggccagactgcctgatttaccccgctatctgggccagattgcccgcacgccccgcctgtatggcgatgcgcccatcgagccgcggcttggccaatgggccgaggcgtggtttgccagagagatagccgttccctttgcggtgaatctcgccagcggggcgatagacgccctggagcgcctgctgtgcgctctgctgctccccggcgacggcgttgtggtggaagatccctgttttctcagcagcatcaatatggtgcgttacgccggttttaccccctgcccggtggcggtggatgccgaagggatggatcctgacggcctggaggaggcgttacgcaacggcgcacgggcggtgatcttaaccccgcgcgcgcataatcctaccggctgtagcctgacggaaacccgggcgcatgccctgcgggaggtgctagcccgctatccgcaggtactggcgattgttgatgaccattttgccctgctgtcggccacgccatggcactcccctcttcctgcaagcacccaacgctgggcgctggtgcgctcgatgtcaaaaaccctcggaccagacctacggctggcctttatcgccagcgatgccgctacttcagcggcgctgcgcctgcggcttaacgccggcagccagtgggtcagccatctgctgcaggacctgacgctggcctgcctgaccgacgaggcgtttatcgcctcgatgacggagacccgtcgtcactatcgccagcagaatgagaaactggcggcggcgctggcccggcacggcttcagccatgctacgccaggggatggcctcaatttctggctgccgctgccagcggcgagccagccctacgccttacgcctggcccgcgccggctggctggtccgggagggagaggtgtttggcatccgtacgccctcccacgggctacgcctgtcgctgggccgtctgagtgacgctgagatttcccgcctggcggccgatattgcgcaggccttagacgccccctgacgcaggcagtccaccgaacgtatcggggaatgatggcagctgccgacaaattaatgaaaaataaacgacagcaggctagtcttacctgcatgccctgatcgccgaggcggacaaatcgctcacaacaaggagcaccagagatgcataacgctgacccggcactgaaagcggtcattgaagcctgcgatcgcgctatctcgcaggaagattacgataccctgatgagttattacgcagaagacgccgcgctggtcgtcaaaccgggcatggtggtcagagggaaagagaatatccgcaaagcctttatcgccattgccgactatttccagcaccgactggtggtgactcaggggaaaatggaggttattgaaggcggcggcaatgcgctggtgattatggagacccggctggatatcccgacggcggacgggatatcccaggttacgcgacgcgccacctatgtctttcagaagcagggcgaacgctggctgtgcaccgtcgataactcctacggcaccgacctgcttgatgattaaatgcccgccccctggctaaagtgttcttcgccgaacacgccggtggaaaggtaacgatcgccgcgatcgcagacgatcgccaccaccaccgcgccaggattttcgcgggctatgcgtaacgcgcccgctaccgcgccgcccgaactgacgccgcagaaaatgccttcccgcaccgccagctgacgcatggtgttctcggcatcctgctgatgaatatccagcaccgtatccaccagcgaagcgttaaagatccccggcatatactctgccggccagcggcggatcccgggaatactgctcccctcctccggctgcaggccaacaatggtcaccggtttactctgttcacgcagaaaacgtgacacgccggtaatggtgccagtggtccccatactggagacaaagtgggtgatacgccccgcggtctgctgccagatttccgggccggtggtggtgtagtgggcgtaggggttatccgggttgttaaactgatcgagcagtttgccttcgccgcgctgggccatctccagagccaggtcgcgggcaccctccatcccctgctctttgctgaccaggataagctcggcgccgtaagcgcgcatcgcggcccgacgctcctggctcatgttgtcgggcatcagcagcttcatccggtagcctttcagcgcggcgatcatcgccagcgcaataccggtgttgccgctggtcgcttcgatcagcacgtctccgggctgaatttcgccgcgcttttccgcttcaacgatcattgacagcgcggcgcgatctttcaccgagccggccggattattgccttcgagtttgacccagacttcgctgccgttgtccggtcccagacgctgaagtttgaccagaggggtattgccgatggtttgttcgagtgtattcacgatttttactcaataaaaaagccgggcggcgcttcgcttacccggcctggcagacgcgtgataattccagaccgggtaagcagagcctcacccggcaaaagcacatggatttaagctatcaggccgactccgccagagcaagctcgccgcgcggctcgatacgctcggtaccgttgtacaaacgcgcgttttgcagcccgacgaacagccgttcgccgcgggacggcgcctcgtcgcccgttaacaccacgctcagcggttcgtcataccaccccagaggctggacgactaattgggtgtagtgccctttcggactggcctccaggacctgcaccggcagcggcgaatccaggctggtccgccggctgatgtccacttcccacgggcgcaggaacaggtccactggcccctggtatgccggggtatagcctaacggccagcggtgggcgccgacgtggaactgtccaccgcggatgaccccctgcaggcggttcacttcccccataaactccagcacgaaacgggtagacggctcacgccatacgcgctccggggcatcggcctgttcgatgttgccctggctcatgaccaccacccggtcggcaacttccatcgcctcttcctgatcgtgggtgacgaacacgctggtgaatttcagctcttcatgcagctgacgcagccagcggcgcagctctttacgcacctgcgcatccagcgcaccgaaaggttcatccagcagcaaaatttgcggctccaccgccagggcgcgcgccagcgccacgcgctgcttctggcctccggacagctgcgccggatagcgatccgccagatgggccagctgcaccatctccagcagtttggtcaccttggctttaatcgccgccgcattggggcgttcgcggcgcggcagcacggtcaggccaaaggcgatgttatcgaacaccgtcatatggcggaacagcgcatagtgctggaaaacgaagcccactttacggtcgcgagcgtgcatccgactgacgtcggtaccgtggaagcggatatgaccgctggtctgatgctccagaccggcgataattcgcagcagggtggtttttccggagcccgagggccccagcagcgcaaccatttgtccggaagggatatccaacgagatatcattcagcacctgggtgcgaccaaacgatttcttaatattggcaatctcaatgctcatgatttccctcctgttgcgcgcgttctttctgattggccagacgccattgcaacatactctttaaaaacagggtcagaatagccattaacgtcagcagggcggcggcggtaaacgagccgacggtgttgtaatcctgctccagtagttcaatttgcagcggcagcgacagcgtttcgccgcggatcgagccggaaaccaccgacaccgcgccaaattcgccgatggcgcgggcgttggtcagcaccacgccgtacagcagcgcccagcgaatattgggcaacgtcacccggcggaacatctgccagccggacgcgcccagcagcaccgcggcctcatcttcatgactgccctgactcatcatcaccggcaccagctcacgcaccacaaacggacaggtaacaaagatggtcgccagcaccatgcccggccaggcgaacatgatttgcagattatgcgcgtcaagccagccgcccagcggaccgttagagccgtaaaacagcagatacaccagaccggccaccaccggcgagacggcgaacgggatatccagcaacgtcagcagcagctggcgccccggaaaggtaaaacgtgtcaccagccaggccagcaaggtaccgaacaccaggttcaccggtacggtaatcaacgcaatcatcaccgtcagccagatggcatgcagcatgtccgggttcgccaggttttccagcaccggcatcaatcctttgctgaaggcctggataaagatgtagagcatcggcaccacaaggatgaaggcggagaccagcatcccgacgccaatcagaaaccattttccccagttgatacggggcgcgtcgtagcgtttcaattgagtaacttccgccattagtgacctaccacgcgtcgaccaaagcgactctgcagggtattgatggaaaacagcagcagcagtgaggcggccaggatcaccgaggcgatggcgctcgccgccggatagtcaaactcctgcagacgaataaagatcatcagcgacgtcacttccgtcttccacgcgatgttgccggcgataaaaatcaccgcgccgaattcgccgaggctgcgggtaaacgacagagcaatgcccgccagcagcgccggcgacagctccggcagcaccaccttgcggaaactctgccagcgcgtagcgcccagcgtttccgccgcttcctcatactcgggccccaactcttccagcaccggctgcacggtgcgtaccacaaacgggatgctggtgaaggccatcgccacggcgatgccgagccaggtataggtgactttaatatcgaacttcgccagccattccccgtaaataccgttcaccgaaaacagcgaggccagggtcagaccggctaccgccgtcggcagcgcaaacggcaggtccattaaggcatccagcagcgtgcggcccggaaaacgatagcgggtcaggatccaggccatcagcagaccaaagacgccgttaaaaatcgaggccacaaacgccgacagcagcgtcaccttataggcggccaccacctgcgggttggtgatcacatcccagtactgcgcccaactcatctgcgccagctgcatcaccagcgcgctgagcggtaataacaaaatcagacagacaaacagcaggctggtgccaaggctcagggtaaagcccggcagcacgcgcttggacgacacagcaaacattacttacgccccgccgccagcagtttgtccagttcgccgccgctggcgaagtgggttttcatcacctcaggccaggagccaaacttatcttccacgcggaacagctcggtctgcgggaatttatccttcagagcatccatcactttcgggttgtttacccgatagtagtagtcggtaatgatagtttgcgcctgtggcgtatagagccagttcaggtaggctttcgccgccttttccgtgccattggctttgacgtttttatcgacccaggccaccgggaactccgccagaatgttggttttcgggataaccacttcaaatccctgcacctcatactgcttgcgaatattattcacttccgattcgaagctaatcagcacatcgccgaggccgcgttcggcgaaggtggtggtcgctccgcgcccgccggtgtcaaagacttcgacgttcttgagaaactgagtcataaactgttcggttttagctttatcgccgccatcagctttatccgccgcgccccatgccgccaggtaggtgtatcgggcgttacccgaggttttcggattcgggaagatcagcttaacgtcagagcgaaccaggtcgttccagtcatgaatgtttttcggattgcctttacgcaccaggaaacccatcgtcgaatagaacggtgagctgttgttcggcagacggctttgccagtcggccgggatcaggttgcctttgtcatgcaggatctgcacgtccgtcacctggttgtaggtgaccacgtccgccttcaggccctgcaaaatagccagcgcctgcttggatgaaccggcatgcgactgcttgatggtcagcttgtccccgccattgtctttcgcccactgctgctcaaaaggcgggttaagggcggcaaacagctcgcgggagacatcataggagctgttcagcagctccgtcgcctgcgcctgcgccaccagcagcatggaagccgccagcgccagatatccttttttcagtgatttaacggccattgcgcacccttatcaacgttgaacattttctgatgatcatcatatttataacgagtacgaaaggagtaacggttttatataccgtttggcgatttggaagtcgaaaagagaataagcaactggcaaagcttagctgaaagcggctcgcagattagacgggtcattgtgacaaacggcagccaggcgtgcactgtgtttatatgaaaaacacacagatatttgctcgtcagctcagacgtagcttaacgcccgcagaacgtcgtccagggtactgactgggcaaccgccgttttgctagcgacacgtttcgccgtcaacaccccgttgccccctatattctcgatttcgcctgctgcgcaatacggctggcgattgaactggacggcggccaacacgatgacgccgcacccgctggcaacagagcgagggatggcgtgttttacgcttctggaataatgagtttgaagagcatgaagatgcggtgatggaggcgatacttgaagcacctgaaccgccaatgccctcacccctcccctctgactgagggagagggagtaaaagaatccgcacgcagatcccatagccgcaccttaccgtcccctctcccctttggggagaggggacggtaaggggaaaaattacagcgcctggatacgctccagcgacggcgcgaaataatatccgccggtcaccggtttggtgaagcgcagcatcgcgtcgcgtttaccgtcggtatcgccaaacatgctcagcagctgctgctcgatgttatacaggcgcgcgcagtaggcgcagaaatagaggccatgggtgccgctggcggtgccgtacggcaggctctgacggacgattttcagccctttgccatcttcttttaagtccacgcggctcaggtgcgacgtgaccggacgttcatcgccatcgatctcttcgttagcgtctttagtacggccgatcatcatctcctgatccggcacgctcatgcggttcagctgtttgagattatgctcccagcgctggacgaacacgtagctgccgcccgcatccacgccgtctttaatgaccgccacttcgcggcgggtttcttcccccgccggattttcggtgccatcgacgaagccgctgaggtcacgctcttccacccagcggaagccgtggatctcttctttcacgtcgatagcgtcgccaaaggcggccagtgcggcctgcgccaccgagaagttaacttcatgacgggcggataaaatatgaatcagcaggtcatactgggtggacggcgccagccctttgccatagaccgggaaatcttttaactcatccgccccttcgccgccgctcagctgacgccagacgttattgccgaacgccaccaccgcaccgagtttggcgtcggggaatttagcctggaaggtggccacgttatcgacaaaaattttgctcgcttcgcgcagggcgttaacgtcccctttgagattggcttcaatccaaatcgccgcgcggcaatgttccggcaaaatgccgctctgaacctgagacatcgctcctcctgaaatgatgcaaccacaacgctgtcgcgttgctaacgcgccattgtaaccgtttttcagagctgtcgtgtctcttcagatcaatttagcgacgccagataatcttgctgaccttccagtttttcagcgtatcgtcggagggcatcagctcgtccggaccgctccagtggccagtgaaggcatagctgatatgctggctcccctcggcctgacactcgacgaccgccccgttgtcatggctgcctttctggcagttgccgaaggctttgctgtacaggtcgctaaacggtgtgccgattttcacgccgctggcggttttgatatccgcatcacgcacgtcaatccggctgatagcaccgttgtcgccattgatggtcagcgccacgctgttgtttttcagcgcttcaaagtagtggacgatattgcccttatcggtcttcattccgctgcgtaaacggtagtcgctgcccagcgcatcgctaatcgcctgttcattgagcggcgtggaagccgtcagtttacccactccctgctcggtcacctcggtggaagcgccaaaccagttccacggataggccgccgaccagttgactgcgctcatcgtggagcagccggtcagcgccagcggaagcgcacagagcattacacgtagcgatttcatatctcaatcctttctgagtcattcaacgcatgttggagttcacgatcggcaaaaagtgccattaaaaggtggtctggtgaaaacaggcgcccaggcgacggctggttaacagccaccacagggcatagccatccgcgaccagcagcgcaatggtcaacgaggagggagattcgccgctcagccatagcatcggctgccacagcaacagcagcacttgcgatagcaccagcagccagcgcatcgcccgccacaggcgcggcaggcgctgacgatagccgctaagcagaaaggccagcaccgccggcacgcctggcagtaaaccaagccagaagcgctcgtgatcgggatagaacagattaagaatcgcgtcgccctgctggcgcgatgcgccggccatcaaaaacagcacccacgtgcgggcctgcaacaacagcacgcaccagaaaagcaaaggcaggcgcagacggccatgggcatcaaaatcggcggggataaactcagtattcttcatcttcgatcagtcgcttgcccagggtcaggacatcggcgtactcatagcccaaccgctcgtacattccctgcaccacgtcgttgtcttcacggaccataatgttgattttcgggcagccgcgggcaatcagctttttctccagacggttgagcagcgcgttcgcgataccccggccgcgatattccggatggacgccgagataataggccgatccgcgatgaccgtcatatccgcccatcaccgtgccgaccacttcgccattcacttccgccaccagaaacaggctgacgtcgtgattcagcttgcgctcaatatccatctccggatcgttccacgggcgcagcagatcgcagcgctcccacagcgtcacaacctcttcgaaatcctgctggcgaaaaacgcgaatctccatggtattccccaccattgacggttaaaaacagtgattatggcgcgaatataactgatagccaatatcaggcgaaatcagcgacaaaaaatggcataatatgactttgtcatgtattgaaatgaaaagtaaaacaattcttattttgaatggtcgtaacggcaaacgcgatacgatataacattggacatcacttgtttacaattcaggccgaatgagcacttttaaacccttaaaaatacttgcttcgcgccgtcaggtgctgaaagccgggctggctgcgatgacgctgagcggcgtcgcctcacaggtcagcgcaaaagaacagccactgaaaacgtcaaatggacatagcaaacccgccgccaaaaaggccggaggtcgccggattgtaatgttagatccgggccacggcggcatcgataccggcgctatcggccataacggctcgaaagagaagcatgtggtgttggcgatcgctaagaacgtgcgcagcattttgcgcagcaacggcatcgacgcccgcctgacccgcaccggggatacctttatcccgctgtacgaccgcgtggagatcgcccatcagcacggcgccgatctgtttatgtcaatccacgccgatggcttcaccaacccgagcgccgccggcgcctcggtgttcgccctgtcaaaccgcggcgccagtagcgccatggcgaaatacctctccgatcgcgaaaaccgcgccgatgaggtcgccggtaagaaagcgacggataaagaccatctgctgcagcaggtactgttcgatctggtgcagaccgacaccatcaaaaacagcctgacgctgggctcgcatatcctgaaaaagatcaagccggtacataagctgcacagccgcaataccgagcaggcggcgttcgtggtgctgaagtcaccatccataccgtccgtgctggtggaaacctcgtttatcaccaacccgaacgaggagaaactgctcggcaccaccgccttccggcagaaaatcgccaccgcgattgccaacggcattatcagctatttccactggttcgataaccagaaagcccattcgaagagacgttaatgaaacccgatgccgcgcaggtaaaaacttttctgctccagctccaggacagcctctgtcagcagctgagcgccgtggatggcgcgccgtttattgaagatgcctggcagcgggaaggcggtggcggcggacgcagccgggtgctgcgcgaaggccgggtgttcgagcaggcgggggtcaacttttcccacgtccatggcgacgccatgcctgcctccgccaccgcgcaccgcccggagctggccggacgcagttttgaagccatgggcgtctcgctggtggttcatccgctgaacccctacgtgcccaccagccatgccaacgtgcgtttttttattgccgaaaagcctggcgccgacccggtgtggtggttcggcggcggctttgatttaaccccttactacggctttgaagaggatgccgtccactggcatcgtaccgcccgcgatctgtgtctgccgttcggcgaggaagtctatccgcgctataaaaaatggtgcgatgattacttctatctcaagcaccgccaggagcagcgcggcatcggcggtctgttctttgacgacctgaacaccccggattttgaccactgcttcgcctttatgcaggcggtcgggaacggctatgctgacgcctatttacctatcgtcgaacgccggaaagccacgccgtacggcgaacgcgagcgccactttcaactctaccgtcgcggccgctatgtcgagttcaatctggtctgggaccgcggcaccctgttcggtctgcagaccggcgggcgtacggagtcgattctgatgtcgatgccgccgctggtgcgctgggaatatgattatcagcccgagcccggcagccccgaggcggcgctgagcgagtttattcaggtgcgcgactggctgtaacggccggatggcggctggccacccggtagcggagtctcttccctcacacccactggcgcaggcgatggtgcagcgtcatcgacggtttctcagcaaacagctgctgatagtcggtggcgaactgccccaaatgccagaatccccactgcatggccgcctccttgaccgtctcgcgctctgaccaggggcttatcagctcccgacgcacggcgttcaggcggatccgtttgagccaggcgttaggaccaatccccagaatcgcatggaaggcgttttgcaaggtgcgacggctgacgtacagctgctggcacagatcgagaacggttaacggctccgcgctgttttccagcacatattcgcgcgcctgcgccagcaggcggcggtagctctggtggctgacgctctctgcacttaccatcggctgcgcttcttccagcatcgtgcccatcgccagcaacagattatcccgcaggactttacgcacggccggctgatgaagggtatccggatgctcgctaaaggtggccagcgcctgctggacaaacccccacagcgcggccttatgcggctcgcggaccgccagcgctgactggttgcgtagcatatgcagcactcgctccgggtggtgcaggaaactggcgtgacgcgcaatcacctcctgcgaaatcactaccccgagaatggtgtaatcatccggcgtgctgagctcgaactccgtaccgccgggacgggtggcgatttctgcccggcccagacactgcgagccgataaaaccttgttcaccccgggtcgccggaatgccaaaccagaaggagttcggccagaccaggcaggactggcgcagcgccagcccggtatattcgcggaagacctggatctcatcgagcaggatttcggtaaactcgccgcgaaactgccccggatgcagctgatcgtagatctgttgccaggcggtaatggtcagggcgtgctcatacacatcggttgtgtgtcgttgatgaatattgtcaatttcaacctgaggcgtcagcctggtgtcttccggcaacgcctcgcaacagagatggtgcaaatttgcagaacgacgctttttcataatcgttaaagccgggggcaagccgctcccggcacctccgacaggttatggatttttgagacgatagcggctactgcgttttcgtagcgtccctgcggaaaagagctgctccagcgcctggcgggccttatccagcggccaggcaaaatgcgcggcgacctcgccggccgtcatgccctgacgaactgaagccagcagcgtcagtaaggcttccgatgaagccgggtcagcaggcggcatgggcgctggcggcggtggctgaaaaccgccgatcagccgctgggtatcctcttccgggcggccaatttcccgacggctgatcacgcagccggtccgccgggcagcggcggccccggcatccagcgcggcgcggcaggccgccaggtcgccctccaccaccagcgttaacctgcccgggtcgagcacttcatgactgagcaggcgcacattggccgccttaagcatggcatccgcagcgtctacagccgcgaccatgccctccacttcgagcaatcccagcgcattgatcatcgctccctccattacgcacgctgtacaggatgacgggcaatatcgagaacggcatcggtaaaggcattgcaggcggctttacaggcggcctggcttcccgtcaaaaaggcggccgaatagttggtttccgatggcggcgggacgtaggtcaccagctgaacgtcggccgacttcatcgccgcatcgataccaaacgtcgcctccagcggcggcgccaccagataagcaatcggatcgcccaacgcgatgccagcggccgatgaaagataagagccggtacgcgacaccacgtgcgccagaaaggcggtatcttgcgcgtcgttagcccactggaatgccgccccaccttcaatatgcgccatcatggcatccagcccggcgcgaacttccgccgggttcgggccgccaagcatgatcagtacttcgccggcggtaggcgacggaccatgggccgcaccggcgtagagggagcggccatagaccacctccaccatcgcctgctttgtcgcttcgtcggcggcaatatacgtcacatcgtcagaatctgccgtgatgagtccgaggctacgtatatgcgacggtaatttaagctcgcgcgcgaaaccgtcattcaccgaggcaatcacgcgcatcgcggtaaccgagggtcgaatcaaatctaatgctggcatgatgcctccttaacggctcatgttgatgccggaggctttctgctccagcatgcgtttggctaaatccacgatcaccgcggcggcttctaccggcggggtgccgccctggtggatattggagatacaggtccggtcggcctcgacggtggtcgccacccgcggggagtacaccgcgtagcaggagaggctctccgactggccgagccccgggcgctcgccaaccagcaggatcaccaccttcgcgccgaggatctcgccgatctgatcttcaatcttgacgcggccatagcgcacgaagaacggcgtcccgaccttcagacccgcctgtttcaggccggcaagcagcggcggcaggatctcttcgtagttggcggtgatggcatccgtcgacaggccatcggagaccaccacctgcacatccggatccatcacgcactgcgccttcagcgcatcaatcgcttccggactgaggcgacggcccatatccggacgcgtgaggtagaggttcttatcgctaatctcggaacgcacttccagcagcccctgcgctttcacccacgcttccggcacctctttgagcaccgtgtctttcgagcgcgagtgatcggccaggaagcgcagcagcgcctgagtgcgcggacgcgggccggcgcggccggtgcaaacgcgcgccgcggtactgcgtttcagttcagtcagtacttcggcgcggtgcggatgttgtaccccaatccaggctttcgcttccgctgagcccaggtccagcgcgcagctttccaccaccgcttcgctggcgcaggcggcatggcaggccggcgtcgacgctgcgggggcctgcggctgcgactgtggttgtcccatcgacgccattacgctgcgtacaatgtcttcaatctgtttttgatccatgatgtgtcatccccgcgtcatcagaagaacagtgacggatcgcccgcccgtttggtcaggcgaccatttgccataatgcccatcgtttcgagccagcgttcaaactccggcgacggccgcaggcccagcagttggcgcacggtcgcggtatcgtggaaggcggtggtctggtagttgagcatgatgtcgtcgccgagcggcatgcccatgatgtagttgcagcctgcggtcgccagcaggatcatcaggttttcgttgaggttctggtcggcatcggcatggttggtatagcagcagtcgcagcccattgagatgccgctcagcttgcccataaagtggtcttccagtccggcgcgaatgatttgccggtcgttatagagatactccggcccgataaagcccaccacggtgttgacgaggaacggatcgtagtgccgcgccaggccatagttacgcgcttccatggtcacctggtcggcgccgaagttagcgccagcggaaagcgccgagccctgcccggtttcaaagtaaagacagttctccccggcgatgcggttaaactccgcccccaccgcccgcgcttcatcgagcatcgccagctcgacgccgaactctttaagccctttttcactgccgcagatgctctggaagataagcccccccggcgcgccgcggcggatggcttcaatctgggtagtgacgtgcgccagcacgcagccctgggtcgggatgttaaacttgtcgatcaccccgtacaccgtatccagcacccggctcaggttctccacgtcgtcagtgaccgggttgacgccaatcaccgcgtcgcccgcgccgaaggagagcccttcatagatttgcgcggcaatactctgcacgtcgtcgcgggtatcgttcggctgcaagcggcagctaaaggtccccggcagaccgatggtggtattggcttttttgatcaccggcatttttttaccgccgtagatcagatcggcgttggagcagatcttggccaccgcagccaccacctcggaggtcagccctttgcggacaaaggcgatatcgtcgctggtgacctcgtcgttgagcacgtattcccgcaggtcgctgatggtccagtgtttaatccgctgataggcggtttcgttcacgtcatcctggatcaggcgcgtaacgcagtcctcctcatacgggatcaccgggttattacggatatcggccaccgtcatatcggagagcacctgcttggcggccacgcgctgctgcgaactctccgccgctacccccgccagcacatcccccgaacgcagttcgttggctttcgccagcacctcttttacatccttaaactgataaacattgccgaacaatgtggtctttagtttcataagtcgttccctcaggaaggaaatgcgagtgatttcaccgtcaccggcacaaccgatccgccaaaaagaggcgtaccaatgtcgatatagtctcccgcccggatgctcacctcatcgatgaccgccagcggaaggtgtggaagctgtggccgcagcagcatgcccagcgctttgccaaaatcctgctcggccaccagcagcagcggacggggattgggaaagcgggcgacaaacgccagcagggcgtcaattacggtcagtaaggtggcgtagcgcaccggaagtgaagcgggaagcgccagcacgtaagcgtccgcctcgggagccagatcgagctgcgtcagcgcctggagccaggcgttcggcagatcggcggcatcctgcgggatagccaccggcagattgcgcagcggcaatggaaccccctccagccagatggtgctcccggacagggacagcgtatgcgccccggcgccaatcaccgtggcgcgcacggtttgcgccgggaactgcacgttcatctcacgcaggcgcggatgctcgtgcagggccgtggccagcagcggcccgatatcggaaaaacagaaaggatcggcgggctgatggcggtagcactcccccactccgccggaaagggtaatcacctccggctgaatacccgcaggcagtacttcggtttgcatcagcccctgcgccagcggtgagagggtgccgtcgatcacctcgacgatcagcgccgccatccggcgcgccacctgcgccagctgcccggcggtcagcgccagggcgttagtgccggcgccaaacagcgcatcgacaatccgctgccccggcgggtgcgcgtggaccacgcgcccctgagcgtcggtttccagcaggcggccgccgacgttgaggcaggcggtggcgctgacgtttccggcgtcaaacagggcatagttcgaggtaccgccgccaatatcgatattgagcacccggcacatccgctgccgggacagggtctgcgccccggcgccgtgtccggcaatgaccgactccagatgcggcccggcgctggcgacgacaaaatcacccagcgactgcgagagcgccatcaccgccgggcgggcattgcgggttttcgcgctttcgccagtgatgatgatcgccccggaatccaccgcttgtggagcgatccctgctgcccggtactgagccagaatcagcgcctcaagctcggcctctttcaattctccctgcttatcaaccggcgtaaagaagaccgggctttgccagctaatgtcgcgtttgatgaattcataacgcggcacctgggaaaccgccgcgcggttcaccagctcgaggcgcgagaagatcacctgcgtggtggtggtgccgatatcaataccgacgctcaacagctggcgcgtgttcacgagtgcgcctccgcttcgttgttggcaggcgccggtacgttttcatcttttggcaccagcagcatcgccacgccaatcgcggtaacgccgccgaccagcttgccgacaatcatcggaaagatcatggcgttcatattggccgccgcaaaaccgagatggtcgccgagggcgaacgccgctgacaccgagaaggcgcagttgatcactttcccgcgggtatccatctgcttcatcatgccgaacatcgggatattgttcgccagggtagcgaccatgccgccggcagccatattgttgatttttagcagattaccaacgcgcatcagcggcttttcaaaccagcgggtcagcaggagcaccatcggataagcgccgagcagcacgcaggagatagagccaatgacttcgatggcgcgcatcacctcgccgggctggtcgccaggcgccataaagatcggatcgagccccgggatcagctcccagccgagcaggaacttgatcaccgccgccgccaggccgatggtgatcagcgccacgaggaatttggcgaagatctggaagccgttgatcattttttccggaataaacttcagccccagcgccaccagcacggcgacgatgatcaccgggatcatattcatcaggatcagcgcgaaggtaaactctaccggctggccgttgatctccaccccggaatacatcgccaccagaccgccggcgatacagccgatgggaatggtgacaatgcccgccagcacgccgagcgccagccagcggcgatcggttggttcgataatgccgagcgccaccggaatggagaacacaatggtcggccccatcatagagccgaggatcaggcctgagtacatccaggccgccacgtcgccgcccgcgagttctttagcgaggaagaaaccgcccatgtcgcacgccagcagcgtgccggcgaacatcgacgggttggcgccgagcatctcatacagcggaataatcaccggaccaagcagatgagccagcactggcgccagggcggtcatcccgaccatcgccaggcccagcgcgcccatcgccataaacccttcttcaaactgaccgccggatccctcaatgcttttccccagtttgccgagaaagcgcgccgagccgccgaactgcgacaggatcctgtccacggcggcaatcagcataaagaacatcatgatgtacatgatgatttcgttaattcccatagcccttactccctgtcatttatgatttgtagatactgtgaataccgggacattagccgcactcaggcgactttcccgggccgcggcgtgaacgccttacccgggctacggcatagcagacggctgtgatcctgtagcccggctaagcgcagcgcgagccgggaaagccacagccacacgcctccgggaaaatcggcatttatcgcgccgccgcgtacagctcgataatctgctcccggctggcggtgcgtggattggcgcgcaaacagatgtcctcctgcgccgcttgcgcccaggcggcgtagtgcgcggacgtcgcgccagcctccgtcagccgcatcgtcagaccgacctcggcgatcagctcgcgcacggcggcgatagcctcgcggtcatcggttttcttgccggttaacgcccggccgatctggctgaagcgcgcccggcgcaccatgcggttaaactccatcaccgttggcagcagcatggcgttggccagaccgtgcggaatatgcagcgccgcccccggctgatgcgccatggcatggcatagccccagcccggcgctggaaaacgccatccccgccatgcaggaagccagcagcatgttctcccgcgccgccagatcctgaccgcagcccaccgctttcggcagcgcctcgccgatcatggctatcgcccccatcgccagactgtcggtaaacggcgtggcgtggcgggcgctgtaggcctcgacggcgtgggtcagcgcatcaatcccggtcattgccgtgatatgcggcggcacgccctcggtcagcgcggcgtcgaggatcgccacatccggcatcagcgaggcatgcgccagcacctgtttgcgtccactcaccgcatcgataatcaccgtcacattggtggtttcagacccggtgccagcggtggtcggcaccgcgattagcggcagacgtggacgcaactcgctgtgctccgtcatctcccccagcgtctgctcaggattggcgaccagcagtgccaccgccttcgccgcatccagtaccgatccaccaccaaaggccaccacgccgtcgcagcgcgcgtcccgcagctgggcgacggcggcgcagacatcggtgacgcagggttcgccggcgggacagggccagagagtcatagcaatccctttcatcgccaggctacgctccagcccggcggtcattcccgcctgatggagaaaactgtcaaccatgacaaacagatgcctaaggccccgggactgcgcttgcggaccgcaggccgccagcgcgccgacgccgtgcagcgtcaccggcggaacgttgaagcttttcatttgctgaagattcaacgtatcaaaggcatggaacagcgccgtctgcagttcagcttgcatacatcccctccgctttttccctcccgctgttggcgattgccagcggggtcataaacaggctgtgctgcggcaaatgcaccggtaatgccgggaagcgctgacgaaacagctcatgcacgcccggctgcatacaggcgccgcctgccagccacaaatcgacaatcccttgtccggcaatatgtcgggcgacaatttcggccatcttctcgtacaccggcttaaccaccggccagatctccccggcgtggctgcgcttgtactgctccgcctcctcaagcccgatgccgcgattcccggccagagtcagggagatatggtggccgccggtggcttcatccgccgaatatgtcaccctgccctgtttaacgatggcgatcccggtggtgccgccaccgatatccaccaccccggcgttatcgagctgcagcagatcggccaccgcggtaggctcatccagcacatgactgatctccagcccggcggactccaggacattgatcgaaatgcgcggatcggtgccgggcggaaacgaggtcgccgcatgggtgaagcggcagcccagctgctgctcgagagtcgcaagatgtcggcgcacgagggtgacggcgccaaaaaaatcccagacgatgccgtcgcgcaccacgtcggcccagtcaaggcataccgcaaccggttggccgtcacggtcaaccaccatcgacaccacgtcgcaggtgcccaaatcgatgcccagccacagcggcgactcgctggcggcgggcgcctggttacacagggcagcggctttttgtagtctcggcgaaagccagcgttgttcgtcgtgcgccatgttcatcctttatacgattcgaaacgcatccaccagcacgcagcggcgcagacgaacgaaggtccgcgcgctggtcaccccttccccggttggggtggtgatggtcatggtggtccagccctcgccgcccagcccaagcccggcgatgcacggtccgtttttgacgaagatgctggtgtcgatggcgttcgccatctggttcatgttgtcgatgttgcgcgagtgcatcgccgcggtgtggtggcagccgccttccagttgcaccgccagggcgatggcctcttcaacgttcgccacccgcaccaccggcagcaccggcatcatcagttcagtaacagcaaacggatggctggcgggggtttccacaaacagcaggcgggtttgcgccggtacctgcaggccaatcgccgcggcgattttgcccgcgtcgcgaccgacccagtcgcggctgaccgtgcctttgccgcgctcgtcaatatttttcagcagcagcggctggagctgttcggcctgcgccgccgtgagtttcaccgcctgctggccttccatcaggcgcatcagttcgtcggcaacgctatcgaccacgatcagcaccttctcgtcggcgcagataatgttgttatcaaaagaggcgcctttgacgatcgcctgcgcggcgcgcggtagatcggcagtctcatccaccaccaccggcgggttgccagccccggcggcgatcaggcgtttgttggtatgtttgcgcgccgcctcgaccaccgcttcgccgccggtcaccaccagcaggccgatgccagggtacttaaacagccgctgggcggtgtcgatatccgggttcgccacggtcaccagcaggttggccgggccgccggcggccactaccgcctggttaagcagggtaattgccctttgcgagatctttttcgccgccggatggggggcgaagaccacgctgttgccggcggctatcaggctaatggcgttgttgatcaccgtcgccgccggattggtggacggcgtcaccgaggccaccacgccccagggcgcattttcaatcagcgtcaggccattatcgccggtgagcacctgcggagtcagacactccacgcccggcgtgccgcgcgcctgcgccacgtttttggcaaacttatcttcaacgcgtcccatgccggtctccgtcaccgcaagctccgccagttcacgggcatacttttcacccgcctcacgaatggcctgaatcacctgctgacgcatcgccacccgctttaatccctgctgggccaccgttgccgccgcgacagcgtcatccagtgaggcaaaaacgcccatatcatgaacggtgccggcaggctggctgctgtctttcattttcagcagtaccgctttcactacctgttcaatgtcctgttgattcatgatttttcaccctacttatggaagagcacctgaccatcggccgcagcctcatccacgataccaatcacgcacagatcgaccggagaggcgccgtgtgcgtgcgcctgtcgcgccgagctgccgctgaccagcagtacccactctccgcatcccgcgccgatgctgtcgatggcgaccgcacattgcccgtcgggctcgccgcgggcattgagcatctccaccatcagcagtttgtcgtgggccagaccttcatggcgtacggtgcagaccacatatccggttaccacagccagcttcatgtccgtctccgcgtgtgatgtgcaggccggaaaagcgcaacgccatccggcattcatgccttttcatggccggatagcgacgcgctggcgtcttatccggccagaactttccggccccccctcccccgttagatgttgctgtcgcccttgaagctaatcgggaagacctcttccagatcgccatgcgggcgcgggatgacatgtacagagaccagctcaccgatacgctgagccgccgccgccccggcatccgtcgcggctttgcacgccgcgacatcgccgcgcaccatggcggtcaccaggcccccgccgatctgtttcactcccaccagcttgacgcgagccgctttgaccatggcgtcggaggcctcaatcagtgcaaccaggccccgggtttcaatcattcctaatgcttccattgtgttttcctctcataaggggtcctgaaggggaccattcattcaaccagcgtggacgagtcggggatccggcttgcgtccgtctggcgcggtaccgacgccaccagcgccagttcgataatttcctctacgctacagcctcgcgagaggtcgtgaagcggggcggccaggccctggatcagcggcccgatggcgcgatatccgcccagccgctgggcgattttgtagccgatgttgcccgcctccagcgacgggaagaccagcacattggcccggccctgcagcgggctgccgggcgctttgtgcgcagcgacgtccggtacaaaggcggcgtcaaactgcagctcgccatcgaccatcagctgcggcgcccgctgacgcacgatctccgtggcctgctggacgttagccacacagggatgccgggcgctgccgtgtgtcgagaaggacagcattgccacccgcggcgcttcgccagcgatcgcttgccaggtctcggcgctggcaatcgcgatatccgccagctgcgccgcggtcggctgcggcaccacgctgcagtcggcaaaccccagcggctgtccggtatactgcggcagcatcagaaacagcgaagagagcgttttacatcccggctgcaggccgataaggcgcagaccagcgcgcagcacgctggcggttgacgagagatttccggcgatacacacctcggcctgcccggcgctgaccatcgccgcggcgaacatcagcgggtcggccagcttgtcgaccgcgtcagcgggcgctttatcgccggcgcgcgcctgccaggcggcggcaaacgcctcgcgcatcgccaggttgctgtgcggatcgatgacctgcaccccggtcagcggcagacgttcgccaagggcgaactgccgcagcgcgaaggggctggcgacgaggatcggatgcgccaggccctgctgctgcagataatgcgccgccttcaacacgcggacgtccagcgcatccgggaacaccaccctggcgggggcgcgcagcgccagtttgcgacactggtcaatgatcatcttcacctcccagctgctgctgtagctgcctgagggttggcggcgaatccgtcacgcccaggatcatcatcacgtagaccgcgctggagaggcggttgagcgcttgcataatatcggcgcgctggaccgcaaattgcggcgtaataaacacctgcgccgcggtcacctccgcctcgcgcactttgccgcgcagcaaattaagcagcgcgacatcgcgcccatggcgggcctccggcaccaggtgatcgtgacccaggtaacgcagcggctgatgggacagacgatgcagctgcgcctcgctgaatccggctatcgactgcgccgccagcggttcctccagcgcatcggcgcgcatgatgttgcccagccgcgaacggatatccgtcagccacggctgccagggctccgccagttcaatttgcagccacaccgtcagggcgatggtgctgtccagcaccgcgcggaaggccagccgcggatcgtttttcgccaccagggtatcggccgtcagatgagttaaggtgtccggctttttgcccaccggctggtgacaaagctcgcagcaggcctggggcggatggtcgctgctggtcaggacatgcaccggctgcggcgtctgttcgtcatcctcgacaaacaggcgcccctggcggtcgagaaatttgacccgcagatgccgactttccagcagttccctcgccgagggcgtcaggcgggcatcggcaggaagatggatttcaccgccttcgctgagcgtatgattcgctctgagccacgcttcggtaatgaaatcgttcatagcgattgccagtttgccggccaggcgacgtacaggaagcgcaccgtcgacggggtaccgaattcgatgctggagcctttcgggatgaacacgacgtcccccgctttggcgaccagcgtttccccctgatggcgcacatgcagctcgccctccagcaccatatcgatttcgtcgtagttcagcgtccacgggaagaaggcgttctcccactgcataaatccggccgccatgctgctgccatcctggtcagtcaccaggtccgttaagccaacgcagtgcggctgggcgccgtcgaagcggccaaacttcacgctgctgccgtcgatcactttgatgccgcctttgccggtcacggagtcaaatcccggctgcatcgcctcctgctccagggactgcttctccttcatcaccttttccatcagctgcgccaccaggctttcggtaaactggccttccggcagctgcgccaggatggtttcccggatccgctggctttccgttttgtcgctgtccgccgctgtcgccgccggcgcggcgccatcgtcttcggtgatagtgaatcccagcagctcggcgacttcgcgcgcttccggggtgataatgctggcgcgcagaactactgacatcgcctgttcgccgcgcgcgtgggcggcacgaatatcgttagcggtaatgagtttcttcacctggcccttcctccttttggctgagctcactcaagtaattttccagcggcgcaacgctttgcggatcgcaaccgttgagggcgaaaaccggcgcctgaaaccccatcccgtccagcagctgccgcaccgcggcgacattggcatccggcagatccgttttgctgatcgccacgataaggtgctttcggctgccaatatccagcaacccgggtggcaggcgactttcggtatcattggccgcatggacataaatcagggtgtccacatcctgcaaggtggtaattaaggcgtgataccagcgcggatggctgaaatattccccgggtgtatcgatgtcgccacgatcgttaaattccagcgcctgcgtttttctggcgagggaataattcccctgcagggcattaaataacgtggtttttcctgcaccgacggcgccgacaatcgcaatacgcttcatggtcgctctcaattaacttttcgttaattcgcacaaggtataatttaataagcggcctaatccgccgatggtctgcagaagcgcctcctccaccgcgccgaccgagccgtagatcaccagcgcgccgctaaaccggtcgagaaaaccgatgtgcacgtcggcggccttcatcgccagatcgccggcgatcatcgccgtttctcccggcgtcagcgtcataatgccgatcgcgccggattcgggtacgccgatctttttcgccagctccgctcccgggtgggcaatcagatgcgccagcgtgacctgtttgcctggtacgaattcctgaataatgcgttctttatccatgactgattgccccctgaaatctgtcctcatggtgacgacatttcagcgcggcaaataacaaatttcggcaagtggggttaaaaggtgaagtggatcactcaggagagaaaataatattgcggcggaattaaaaaggcaggctcagcgttttttactcaccggcctgcctgatattgcgcgcggaaacggatccgcgcgttaacgggggaaatagaaaattacagcggttcggtttgcgcttcgacaaccgccagcgccaccatattgacgatgcgacgtacggaggcgatcggcgtcaggatatgcaccggcttcgccacccccatcagcaccggcccgacggtcaccccttccgaactggagacgcgcagcaggttatagctgatccgggcggcttccatattcggcatcaccagaatattggccgcccccttcagcgggctgtccggcatgcgatcgttgcggatgctttccaccagcgcggcgtcgccatgcatttcgccatcgatcatcagctccggggcgcgggccttcaccagctccagggttttacgcattttgctggctgacggacagtcggcagagccaaagttggagtgcgacagcaacgccacgcgcggttcaataccaaagcgtcgcacgctttccgccgccatcagggtgatctccgccagctcttccggcgacggatcgtgattgacataggtatcggcgataaaggtgttgccgctcggcagcagcagcgcattcatcgccccggcggtgctgacgccgtctcgatagccaaacagcggctgcaccacgcggtagtgatcgtggtactcgccaatagtcccgcagatcatcgcatccgcttcaccgcgatgcaccatgatggcgccaatcaccgtggtgttgctaatcaccgcccgctgcgcctgctcctgggtaatgccgcggcgcttcatcagctggtagtactcgctccagtactctttaaaccgcgggtcggattcattattgacgatctcaaagtcaacgccggccttgatctgcaggcccagcttctggatgcgcatttcaatcacgctcgggcgccccaccagaatcggtttggccagccccagcgacaccagctcctgagtggcgtgcagcacccgggtctcctccccttccgccagcaccacgcgcttcggctctttgcgcgcctgagagaagataggcttcataaacaggttggttttatagacgaactcgctcagcttctcgatataggcgtcaaaatcagcgatcgggcgcgttgccaccccggaatccatcgccgccttcgccaccgcgggggcgatcttgacgatcagccgcgggtcgaatggcttcggaatgatgtactccggaccaaagcttaaatcctgatcgccgtaggcggaggccaccacttcgctctgctcggcatgggccagctcggcaattgcatgcaccgccgccagcttcatctcttcgttgatcgccgtcgcgccgacgtccagcgcgccgcggaagatgaacgggaagcaaagtacgttgttgacctggttagggtagtcggagcggccggtacagatgatggcgtcatcgcggacctgcttcgccagcggcggcagaatttccggctccgggttggccagggcgaggatcagcggcgcccgcgccatcttcttcaccatctcctgagtcagcacttttggaccggagcagccgaggaaaatgtcggcgccgtcgatcacgtcatcgagggtgcgtttgccgtcgtcttccaccgcataggcggctttggtttccgccatgttcggctcacggtctttatagataacgcctttcgaatcgcagaccacgatgttgtgcttttgcatccccagcgccaccagcagattcatacaggcgatcgccgccgcgcccgcgccggagaccaccatccgcacgtcggacagattcttctcgacgacgcgcagaccgttgaggatcgccgcggtgctgatgatcgccgtgccgtgctgatcgtcatggaagaccgggatattcatccgctcgcgcagctgctgctcgatgtagaaacactccggcgctttaatatcttccaggttgataccgccgaaggttggttcgagggcggcgacgacgttaatgaatttgtccggatccagctcatcgacttcgatatcaaacacatcgataccggcaaatttcttaaacaggacgcctttgccctccattaccggcttaccggccagcgcgccgatgttgccgagccccagcaccgcggtgccgttggagacgaccgccaccaggttgccacgggcagtgtatttgtaggcggccagcggatctttttcgatttccaggcagggggctgcgacgcccggcgagtaggccagcgccagatcgcgctgggtggcgagaggtttggtcggcgagacctggatttttccgggaaccggaaattcgtggaagtcgagggcgctctgttttaactgctcatccattttctattcctttctttcacgtatcgttcgtaggggaaaagcgtgatgaccatcctgtcgttcacctttcagtggcagacagtatccctcctggcggggcgataaactttgaacaccgccaaactctggccatcgttatgattttgttgttatcaatttatagcggttatgttacccggattcgccgccaataatagccctgtctgctatgctttttggttatgtacctcatcaatgtttataccgtataccggcaagcactcatgtaacaccttgttccaggaggacttatccatgaatcagttagacagcatcaagcagttcaccacggtggtcgccgacagcggagacatcgaatccatccgccactaccatccggaagacgccaccaccaacccctctctgctgctgaaggccgccggcctggcgtcctatagcggcctcatcgacgacgctatcgcctgggccaaaaaacagggtggcggccgcgaagcgcaggtggctcacgcctgcgataagctggcggtcaattttggcgcggagatcctcaaaagcattcccgggcgggtctccaccgaggtggacgcccggctctccttcaaccgcgagaaaagtatcgagaaggctcgccacctggtggcgctgtatcaggagatgggcattgataagtcgcggatcctgatcaagctggcatccacctgggaggggatccgcgccgcggaggtgctggagaaagaggggatccactgcaacctgacgctgctgttttccttcgcccaggcccgggcctgcgccgaggccggggtttatctcatctccccgttcgttgggcgtatttatgactggtatcaggcgcgcaaaccgctggagccttacgtggtggaggaagatccgggggtgaaatcggtgcgcaatatctatgactatttcaaacagcataaatacaacaccatcgtgatgggcgccagcttccgccgcaccgagcagatcctggcgctggtcggttgcgaccggttgaccatcgccccgcctttattaaaagagctgcaggccagcgataccccggtggtgcgcaaactgatccctgccagccagatcctgccgcgtccggtgccgctcagtgaagcggagttccgctgggaacataatcaggatccgatggcggtcgaaaagctagcggaggggatccgcctgttcgccgtcgatcagcgcaaactggaagatctgcttgccgccaaactgtcactttagtctcacggagaaaaatatgtcccgaagagagcttgccaacgccatccgcgccctgagtatggacgccgtgcagaaagccaactccggccaccccggtgcgccgatggggatggctgatattgccgaagtgctgtggaacgattttctcaagcacaatccgcagaaccctgactgggtggaccgcgaccgtttcatcttgtccaacggccacgcgtcgatgctgctctacagtctgctgcacctgaccggctacgatctgccgctgtctgaactgaagcagttccgtcagctgcactctaaaacgcccggccacccggagcatggctatacccctggggtggaaaccaccaccggcccgctgggccaggggctggcgaacgccgtcgggatggccatcgccgaacggacgctggcggcgcagtttaatcgccccggccatgagatcattgaccatcacacctgggtgttcatgggcgatggctgtttgatggaggggatctcccatgaggcctgttcgctggccggcacgctcggactgggcaagctgatcggtttttacgatcacaacggcatctccatcgacggcaaaaccgaaggctggttttccgatgatacggcggaacgcttccgcgcctatcactggcacgtcataggcgatatcgacggccacgatccgcaggctatcaaacaggcgataacggaagcgcaggcggtgaaagataaaccgtcactgattatctgccggaccatcatcggcttcggttcgcccaacaaagccggctcagaggagtctcacggggcggcgcttggcgaaaaagaggtagcgctagcccgccagcagcttggctggaaatatcctccgttcgagatcccgaaagagatctacgcgggctgggatgcgcgtccgcgcggggaaaaagcggagcacgcctggaacgagaaattcgccgcctaccagcagcagttcccggagctggccgctgagctgacccgacgtatgaatggcgccctgccggaagactttgccgcgaccgcccgcgactacgtggcgaaactgcaggccgagccggcgaaaatcgccagtcgcaaggcttcgcaaaacgcgctgaacgcctacggcccgcaccttccggaactgctgggcggttctgcggatcttgcgccgagtaacctgaccatctggtctggatcgacatcgattaaagaagatcctgcgggcaattatatccactacggggtgcgcgagtttggcatgaccgcggtggccaacggcattgccctgcacgggggctttattccttatacctcgaccttcctgatgtttgtggagtacgcccgcaacgccgcgcgcatggcggccctgatgaaggcccggcagatcatggtctatacccatgactcgatcggtcttggggaagacgggccgacgcaccaggcggtggaacagctggccagtctgcggctgacgcccaacttcagcacctggcgcccctgcgaccaggtggagaccgccgtcgcctggcaggcggctatcgcgcgacagggcgggccgacggcgctgatcctgtcgcgacaaaacctggcgcagatgccgcgtaccccggaacaggtgcaggatatcgcccggggtggctacgtgcttaaggatgccggcggaaaacccgacctgatcctcatcgccaccggctcggaagtggagatcaccgtcctggccgcggaaaaactgttggccaaaggggtaaatgtgcgggtcgtctcgctcccttccactgatgtgtttgacgcccaggatgaggcctggcgcgaatcggtgctgccgtcggacgtcagcgcccgggtggcggtcgaagccgggatagcggactactggtataaatatgtcggcttaaaaggcaagatcgtcggcatgaccggctatggcgaatccgccccggcagagcagttgttcccgttctttggctttacggtcgaccatatcgtcgccaccgccgaacaggtgcttaacgggtgatccacagcgtgggccaggcatctggcccctgccagttgtcgcacgtcggctgctgcgcgtagcgggagaggctgaaccgctggccgtcaaaacgccagcgggtttggatcccgcaatcgccggccccgcggcctttatccagggtcaccagctcatggcggcggtcatcatagctggcgttgatcagctcaatctcacgcggcgcctcgcccggcggctgaaatggcaacgttagccgcacctgacgggcgacataggggcgctggcgggagaccagccaggccagccagacggtgttgtaggcgccggattcgcagctggtcatcagcagcactttgtcatccgtcagcgcagtaacgcgaatttcacggcggaagggatcgagggagcagtggctgttggtcatccgctcattaccgtagtccatcagatcgttgagctcctcacgccccagcggcgactgcgccgtttccgcgctcgccaccgcgcgcagcgccggcgccggcggtacgctgagcggcggctcttcccctttgccgacccaggccgtttcgctacctacccgcttttgccgatcgtcgataaaaaacagagccgctttcaacccctgcagggagatggtctgcaggccattggccagcgagagcgctttaccctcctgaacctgctggagaaacgcatcgatcgtcacgctgtcggcggttttaatgagcttatcttcaatgtgccagcgcttgtcggtcagggacagcggtttaccatccagcagcaggcgcggcgctatcggcgcgagcgtcgccactggattgccggtgccgcccagctcgatacgcagactggcgtcagtgactgccccagcgctgcggctgagggtcatcaccaggccatgatgcagccccacgttacgggtgacgcagaaattttggttgttacaggtgaccagccagtcgttgaagcgctgctgcgtcggtgccgaccatgcctgcgagcaaggcagcaccgccataaaaaggaaaaagatgacgcgaaaaagcatgaaccgcccgaccccagataaacccgaccacggcgcctatcctggacaacggcagcgggttactcaatcggatttgtcagagttccccgacatcaggccggaggtttgcagatattgcagcagaatgaccgccttaccgtcgcggatctccccgtcagcgaccatctgcagcgcctggctaaaaggcagctccagcacctcgatggcttcatcatctaccccgccgccgctggtggttcgctgcgcgtcgctgtactcggcgataaagaaatgcactacctcggtgacgccccctggcgacataaacagctcaaacagctttctcacctcgcccacttcgtagccggtctcttccaccgcctctttacgaatgcaggcttccggctcgtcgttgtccagcagcccggcgcaggtttcaatcagcatgccgtcatgattgccattgacccaggtggcgacacggaactgacgcaccaggaccaccgtctgcttatggcggttatacagcagcacggtggcgccattgccgcgatcgtagacctcgcgcttgtggcgcacgacgctgccgtccgcccgcgtcagctcataggtcatgttgcgtagtacgaaccagttctcagagaggattttatctttaatgacgtgaatattgagtgacataccgaccccacagcgtaaaaggacgccctcatactacgctgcggagccgggtttgtcgtcagtgaagcggcgtcgttttccgcgccagatagtccaggatcccctgcgccgcgtgacggccttccgccatcgccgtcactacaaggtctgcgccgcgcacggcatcgccgccggcaaagatcttctcctgactggtctgataacggtaacggctctccactccggctttaatacgcccctggctgtccagcgccacccccgccgcctccagccagggcatgcggtgcgggtggaagccaaaggccatgatcaccgcatctgccggcataacaaactcgctgccggggatcggcgtcggacggcgtcttcccccggcgtccggagcgcccagctcggtgcgcaaaaagcgtaccccgttaacccgcccgttctcgtccagctcaagcgtcaccggctggacgttaaactcaaagagcgccccctcttcgcgggcgtttttgacctcttttttcgagcccggcatgttggcttcatctcgccgataggcgcaggtcacctggcgggcgccgtggcgcagcgcggtgcgcacgcagtccatcgccgtatcgccgccgcccagcaccaccacgttcagcccggcggtgttgacataaggctcttgcgccgatgccgccagccccatcacctgtttggtgttggcgatgaggaacggcagcgcatcgtagaccccgggggcctcttcgttcggcagccccgccttcatggagcgataggttccggcgccgacgaacaccgcgtcataatcggccagcagtgtcgccatggagatatctttccccacctcgcaattgagctcaaagcggatacccatctcgctgaagatcgcccgccgccgggccaatagcgatttatccagcttgaacgccggaatgccgaaggtcagcagaccgccaatctccggatgacggtcgaagaccaccggctggacgccgtggcgcaccagcatatcggcgcaggccagcccggcaggaccggcgccgataatcgccacccgcttgccgctcggcttaacctgcgaaaggtccggacgccagccgctggccagcgcctggtcggaaatatagcgctcaatattgccgatggtgactgccccgctttcatcgcgcagggtgcaggcgccttcacacagccggtcctggggacagacgcggccagtgatctccggcaggcagttggtctgatgggaaagcgcgaccgcagcggcgatattccccgctttaaccagctcaatccactgcgggatatggttatgcagcgggcaggtccattcgcaaatactgtgctccccacacgtgagacagcgggcggcctgctgctgcgcctgctgcggggtgaacggctgatagatctcctcaaagtggctcttacgcacctccgccgccagcttatccggctccccgcgcgggggcgtcatcgccatttgcctgaccttcgcgccagcattgggctggctgcagagcggcgtagcgcgctgccacggctgcacctcctggcatgccgagcgcagtcgccgctgcttcgccagggtgatcaacgtctcatcgtcggcgagggtcagcgcctgcgcgggacagttttccacacaggccggccccgcctcgcggccctggcatagatcgcacttgtgcgcgctggctttcaccaggcctgcggcctgcggcgtcaccaccacctgcatcaccccgaacgggcaggccaccatgcaggatttacagccaatgcatttctcctgacggacctgaacgctgtcgccggactgggcgatggcgtcgttgggacaactgcggacgcagggggcgtcctcgcagtggcggcaggtgatggcgttacgctggccctccgctttgatcacggtgatacgtggcaaaaagcgctgcggggtcagcacgtgttgctcctcgttatgcgccatcacgcaggccacttcgcaggcctggcagccgatgcactttcggctatcgctcaaaataaagtggttcatggcttccttttgtcttcttggtgaataacccctcaatgcgcatgcctatttattacccgacaagatgccgccggaacaatgtccaattgcccaggataaactttttctggagagaatccgttttggatcaatttttttgacttaaatgaaatgaggtttcacaccggcaagggataatgcgccggtctgcggtgacgaagcagactcgctacctgctggcaggaaagctcgaggtttctttacgatacggcaaaagcaacatgataaattacactatctccttaatttctccacgattgccggagaggctggcgctaaagtggcacaggctgtgcaataacaagaaaatgtgcatatgaggtttttattctgatggcgaatttctttatcgatcgccccatttttgcatgggtgctggcaatcctgttatgcctgacgggcgcccttgccattttgtcgctgccggttgaacagtatcccgacctcgccccgccgaatgtgcggatcaccgccaactatcccggcgcttccgcgcaaaccctggagaataccgtcactcaggttatcgaacagaatatgaccggcctcgataacctgatgtatatgtcctcccagagcagcgccaccggccaggcgacgatcaccctcagctttaccgccggtaccgacccggatgaagccgtgcagcaggttcagaaccagctacagtcggcgatgcgtaagctgccgcaggcggtgcaaaaccagggggtgacggtgcgcaagaccggtgataccaatatcctgacgctcgccttcgtctccactgacggcagtatggataaacaagatatcgccgactacgtcgccagtaacatccaggacccgctcagccgcgtcaacggcgtgggggatatcgacgcctacggttcgcaatactcaatgcgcatctggctcgacccggcgaagctcaacagctaccagatgaccaccaaggatgttaccgacgccatcagttcgcagaacgcccagattgccgtcggccagcttggcgggacgccttcggtcgataagcaagcgctgaacgccaccatcaactcgcaatctctgctgcaaaccccggagcagttccgcaatatcactctgcgcgtcaatcaggatggttcagaggtgacgctgggcgatgtcgccaccgtcgagatgggggcggagaagtacgactatcttagccgctacaaccgccagccggcctcaggcctcgggatcaagctggcttccggcgccaacgaaatggccaccgcggagcgcgtgatcaatcgcctcaatgagctggcgcagtttttcccccacggtctggaatataaggtcgcctacgagaccacctccttcgtgaaggcttccatcaccgacgtggtgaaaaccctgctggaggcgatcctgctggtcttcctcgtgatgtatctgttcctgcagaacttccgcgccaccctgatcccgaccatcgccgtgccggtggtgctgatgggcactttcgcggtgctgtatgcctgtggctacagcatcaacaccctgacgatgttcgcgatggtgttggcgatcggcctgctggtggatgacgccatcgtggtggtggagaacgtcgagcgcatcatgagcgaggagggcctgtcgccacgcgaggcgacccgcaaatcgatgggacaaattcagggcgcgctggtggggatcgcgatggtgctgtcggcggtattcgtgccgatggccttcttcggcggcaccaccggcgccatctatcgccagttctcaatcactatcgtcgcggcgatggtcctctcggtgctggtggccatgatcctcacccctgccctttgcgccacgctgcttaagccggttaagccaggtgaatcccatgaaagaaaaggcttcttcggctggttcaaccgcaccttcaaccgcagcgccagccgctacgaaaccttcgtcggcaaaatactgcaccgctcgctgcgctggatgctgatctacgtcgtcctgctcggcgggatggtgttcctgtttctgcatttgccgacctcgttcctgccgctggaggatcgcgggatgttcaccacctcggtccagttgccgagcggcagcacccagcagcagacgctgaaggtggtgcagaaggcggaagattacttcctcaataacgagaagcagaacgtcgagtcggtgttcgctaccgttggctccggccccggcggcaatgggcagaacgtggcccgtatgttcgttcgtctcaaagactgggaccagcgcgacccgcaaaccggcacctcctttgccattattgaacgcgccaccaaagcgtttaatcagattaacgaagcgcgggttatcgccagcagcccgccggcgatcagcggcctcggcagttcggcaggcttcgatatggagctggaggatcatgccgggaaggggcacgatgcgctgatggcggcgcgcgatacgctacttgagctggccgggaaaaatccgctgttgacccgcgtccggcataacgggctcgatgacagtccgcagctgcaggtcgatatcgatcagcgtaaagcgcaggcgcttggcgtctccattgacgacatcaacgatacgctgcaaaccgcgtgggggtcgagctacgtcaacgactttatggatcgcggccgggtaaagaaagtctacgtccaggcggcggcgaaataccggatgctgcctgacgatatcaatctttggtacgtgcgcaacagcagcggcacgatggtgccattctcggccttcgccacctcgcgctgggagaccggctcgccgcggctggaacgctacaatggctactcagcggtcgagatcgtcggtgaggcggcgccgggtatcagtaccggtaccgcgatggacatgatggagaagctggccgcgcagttacccaccggctttggcctcgaatggaccgccatgtcctaccaggaacgcctctctggcgctcaggcgccggccctgtacgcgatttctctgctggtggtgttcctgtgcctggcggcgctgtacgagagctggtcggtgccgttctcggtgatgctggtggtgccgctgggggtgattggcgccctgctggcgacctggatgcgcgggctggagaatgacgtgtacttccaggtgggtctgttgacggtgatcggcctgtcggcgaaaaacgccattctgatcgtcgagttcgccaatgagctcaacgagaagggccaggatctgctcagcgccacgctgtcggcttgccgtcagcgcctgcgccccatcctgatgacctcgctggcgttcatcttcggcgtgctgccgatggcgaccagcaccggcgccggttccggcagccagcatgcggtcggcaccggagtgatgggcgggatgatctccgccaccgtgctggcgatctttttcgtgccgctgttctttgtgctggtgcgtcgccgttttccgctaaaggagcgtccgcaataaaccgacgagcttcggcggcgaggcgtaataacagaaaaggcgaccacggtggtcgccttctttatgtgttcagaaccctagcgcgcttatttacttcgcgttattcccctgctcacattgcggaaatttatttacgaagcatgccttcaataaagtctttccagttccccagttcatgttcaatcataatagcctctcttattattatggtcgattctatataacttcattaccgatgggaagttgtgctcccctattgctctgattgtcttatggaccgctgacagagataaaacctctggttgtcgctactatgccgcttcgtatgtaaacataatgtgacgtagagcaacctcagacaacatttttgcaataatgttaaagccctcacatcatgcccacaggtggccaacatttaaccacccgatatatcgaatgagatccccggtaaaaagttatatttattcatctgaatcacgtattatttcagtaagacttatatattcggaaatatctgagttaaccgcttaattgaatgtaaaaggtttatctatgctcaccatgtacggaattaaaaactgcgataccattaaaaaagcccgccgctggctggaagcgcatcagattgagtatcgcttccatgattaccgcgccgatggccttgagcgtgcgcaactggatacctttattgccgagctgggctggcaggcgctgctgaacacccgtggcaccacctggcgcaaacttgacgagtcgctgcgcaatagcatcgataatgccgacgccgcagccgcattgatgctggaaatgccggcaattatcaaacgcccattgctctgcgcgcccggtcgtcctatgctgctgggttttagtgaagcaagttatcagcagtttaacgaggtatagtctatgtcttgcccggtcattgagctggctcagcagcttattcgccgcccttcccttagccccgatgatgcgggatgccaggcgttaatgattgaacgcctgcgtgcgatcggctttaccgttgaaccgatggatttcggcgatacgcagaatttctgggcctggcgcggccacggcgagacgctggccttcgccggccacaccgacgtagtcccggcaggcgacgccgaccgctggatcaatcccccgttcgaaccgaccatccgcgacgggatgctgtttggccgcggagcggcggatatgaaaggctcgctggcggcgatggtggttgccgcagagcgttttgtcgcgcagtacccgaaccacaggggccgactggcgtttttgatcacctctgatgaagaggccagcgccaaaaacggcaccgtcaaagtggtggagacgctgatggcgcgtaacgagcgtctggactattgtctggtcggcgaaccttccagtaccgaagtggtcggcgatgtggtgaaaaacggccgccgcggctcgctgacctgcaacctgactattcacggcgtgcaggggcatgtcgcctatccgcaccttgccgataaccctgtccaccgcgcggcgccgatgctggcggaactggtcaatatcgagtgggataaaggcaatgagttcttcccgccgaccagcatgcagatcgccaacgtgcagtccggcaccggcagcaataacgtgatccccggcgatatgttcgtccagttcaacttccgcttcagtacggagctgacggacgagatgatcaaatcccgggtgatcgccctgctggaaaaataccagctgcgttacagactggagtggtggctctccggccagccgtttctcaccggacggggcaagctggtggatgcggtcgtcaacgcgattgagcactataatgagatcaaaccgcagctgttaaccaacggcggcacctcagacggacggtttatcgcgcgcatgggggcgcaggtggttgagctgggccccgtaaacgcaacgattcacaaaattaatgaatgtgtgaacgccgccgacctgcagctgctggcgcggatgtatcaacgcgtcatggaacagctggtcgcctgacgaattgacgtaaagaggaagcgcgcatggaatggcttattaaacactggtggattctggtgctggtctttttggtgggggtaattatcaacgtgattaaagatctaaatcgcgttgaccacaaaaaattcctcaacaacaaacccgatctgccgccgcaccgtgattttaacgataaatgggacgacgacgacgactggccgaagcacgaccagtcgaagaaaccgtaagtttgcctttatcgcggtaccgcccgcctgtaaccccgctctccggggttacagcatttcgatgatatcgtccccttttggcgtactgccgctcagcgcctcatcaaaatagtgcttcggcacggtataacgcagacgctcgatcgccaactgcatgctgcgatcgtcaatggcatgcccgagatcgtcgacaatatctaaggtcacgtcgccgcccgcctgctgtaacgcctcctcggccgacaccgcccacgccaggtcgataacccgatcttcaccaccgtggatcaggtgaatggtagtggccgtcgttgccgtctccggcagcgtcgcatagcggccattaaaggcgatgacccgcgaagccagatccggcgccgctttgatactctccagcgacataatcgccccctgagagaaaccgatcagcgcggtggccagtggactgacgccgctcttttcctgccagtagcgtacaatttcaataaaggtcggcataatggcgtcgatgcgctgctgacgattctcttccgtcaccccctgcagcgaaaaccactgccgaccgttggggccgcaaggttccaccccgccaatgctgacgatcagcgcatcgggaaactgcggcgcgaaccagctgccgatttgccccatggagaccgggttatcccctacgccatgaaacagcagcaacagctgttgcgcaggcgccgcagggctttgaacaataaaatgatcgtgtttcatggctgtctccttagtgtttgcgggcagtgtacgccgctcgccagatatgaccatgccatttaactgaatgagttagttaaaaaaattgcagatgcgccacctgctgacgcagcgcctcagcgcgcgctgcatcaaggaagcgcaaggcgtcagcggcctcccgacgccatctcgcctgcaaggcttttcgccccgtcagctgcagcacggcgcagagtgcggcctcctctttgccctgcagtcgtccccgcagggccggcaacggcatgtcggcctgcatcagtaggcggttgaggcagcccagcgccgcggccagcgggcggtgggcgaaggcaaagctcgccgcttccagccagtcctcatcactaagcatagcgtctgcgacggccggcagcggcgcggattcctctcgccacgggcgaagccagtattcatcgcgctgcagccgctgcgcctcccgctgcgccagctggcgccctgccgcggtcaacggatagagggccatcgccgtatagcagccgctgctggcctcgcgatgggtacccagccgtacgagggtaaacccgcagcgttgccagaagcgccacagctcagcggtatagccgaagctgacggagagatagtcatagccagcggcatcggcggcgatatcggcgatcatcttccgccccaggccttcccgctggcgggtgggatggacagcgatccgactgacccgcagcccgcgcagcgtcgccgccaggggactgccgccgtgcgccgccagcgactgggcgaccagattcccgcgcggccggcgaaaacccgcccataccgcccggctcagttcgggagaaagtcccccctcggccaccagccacagggcgcccgccaccgcgccgccggtgcgagcgcagcggaaagcctggcccggagcatccatcatgcgccgcagatcgagcggggaagttcggtaatgcgccccggacaatagctggtacatcgcctccggtagcgctggctgcgtttgccagcaggactgattgaccgcctccagggctatctcccccatcggcgcgtcgcgaaatgcctcatcgttaaagataagcaactgactgatggctgactccagcggacagcccgccgcccagcggatcggggcgctcagggtgaaggattgcagatggggcagactggcgcaaaatttcagcaggaacccgcgaccggtgccctcgtacccttgcaccgtcgtggtgagtagcgtgcggggaaaacggctcaccagctgccggagaagcggagccgggatagccgcggcctcatcgactatcagccacgccgccttttctttcgacgccagcagcgcatcgggcgccataaagcgcaacgtctccccggcaaagctggccagcacctcgacagcgctacgcgttggggcggtgacgatggcctcgcccccaagctggcgcaggagcatgcccgccagcgcggacttcccccgtccacgctccgccgtcaccgccgcgataccgggcggcaggcgtatcagttgctcaaggattgccgcctgctcggtctgcgggcggccatcggcgggatgccagtctggacgcggggcggccagcgggaaacgtggccggtccgactgccgccagagcaacacctccggatcggcgataaactgccgacagcagcggtgaacaaagttaggggtaacgatagggtcaggcgtatcgctccagcgcagagagtcctcatccgcccgggtcggccagtcggcgaaggggggcgtcagcagcaccagccagcttcccgcccgcagcgtgccgctcagggccgccatggcggccacatcaaacccgcgccgggcatcgaaaaaggcgtgcatcacttcccgccccagcagcgttttcagcgcgccgggcgccacgcagggcgcagaacccggctcggggccaacccacaggccatcgccgccgagcctctcccgtagcacctgcgcctgctgcagcgtccagctctcatcgccgctgagcaccagcaggcgacggatcccctcccgcgccatttgcgcggtgaggttaagcagcgcgtccatcatgggggacgattacagcgcactgccgaaggtattgcactgcgccggatcgccgctatcgaaaccgcgtttgaaccaggtgtagcgctgtttcgaggtgccgtgggtaaaactgtccggcaccacgcgtccctggctctgctgctgtagacgatcgtcgccgatggcctcggcggcgttcagcgcctcctgcagatcgccagtttccagaatatcctgctgctgcatattatgaccccagacgccggcgaagcagtctgcctgcagctccatcttaaccgacaggcggttggcttcggcctgcgtggcatgctgctgttgctggcggaccttcggctcaatgcccagcagtttttgtacgtgatgacccacttcatgagcaatgacgtacccctgggcaaagtcgccgtcggcgcccagtttatttttcatctcatcgtagaatgacaggtcgatatagaccgtactgtcggcaggacaatagaaggggcccatcaccgactgaccggtgccgcagccggtacgggtcgcgccgcggtagagcaccagctttggctgcgggtactggcggcccatcttttcaaagatcggcccccaggtatcttcggtggtagccagaatgacggaagtaaacttcgccgcttcatcgtctttcggactgatggagcgctgcgtggaggtctgctgctgcggcatcggttcgccggtcaacatgccggtcaaatccacgccgtagtagcccgccaccagcacaataatcagcagtacaatgccgcccttcccgctcggcagacggaagccgccgcccccgccgccgccaaacggcgagcctgattgtccacgtcgatcttcaacattgtcgctttcgcgacgcccttgccagcgcataagcacctcattccctgttatgtatcaatagcagagatcgtaggcggttcagcgcaggattaccacaggaaacagcaagagacgccagaagatgaggccatcttctggcggcgggcgggttagtcgagcttaacgcccaggcggtgagccacttcttcgtaggcttcgatcaggccgccaaggctctggcggaagcggtctttgtccattttatcgagggtgtttttatcccacaggcggctgccgtccggcgaaaactcgtcgcccagcaccacttcgcctttgaacagaccaaactccagcttaaagtccaccagaatcagaccggcgtcatcgaacagttttttcagcacgtcgttggctttgtaggtcagctcgcgcatccgcgccagattctctttactcacccagccgaaggtttcgcagtaggagtcgttgaccatcggatcgtgcatagcatcgtttttcaggaacaggtcgaacagcggcggattcagctcgataccttcttcaatgcctaaacgttttaccagcgagcctgccgcacggttacgcaccacgcactctaccggcaccatatccagttttttcaccagacattcggtatcggagagcagcgcttccatctgggtagggatgcccgcttctgccagtttactcataatgaaatggttgaatttgttgttcaccatgcctttacgatcgaactgctcgatgcgcgcgccatcacctgctgacgtatcgttacggaattccagtaccagcaggtccggattatcggtgctgtatactgtcttcgccttaccacgatacaactcagcttgctttttcatctttcactactccagtgatattgagcctaaaaatacgtttccacctatacacaaaatcattcaaagtgcatcgaggcggcaactgagcgaatccccaggagcttacaaaagtaagtgactggggtgaacgaaggcggccaacaaagaggcaatttgaaggatgatgtgtatacgcacacgtttgcgtcactatatattaaaagggccggattgctccagcccttttgattacttgttaaatgcggcctggaatacggctaccagggcgtcattttgcgactgcgtcagggtgtggcctttcgggtcgataaactgcaggctactgcggttatcgaggtcgccgacctgcagtttgtagtcgccggagaccagctgcgggtcacgtgcgcccagctcctgccagctgctgtcagacagcggcttataggtcagcgccatgctgccctgagagcgcgtgctgtcggtcactttcatccccactttctcgagggcgccaggcagacgctgccacaccaggttaaacggcgcgcgaactacgagcatcggcaggccggtatcgtcggcggcgctctgcacgtcgaaggtggcccccgcgctgcgctgggcggcgttctgggcgctggtggcattcatgtcaaggccttccgaaatgacgttcagcatagcggtgctgtagcgctgcagagacgccggatcggcaaccggtttacccgcctgctccagattcaccagcttaacgaccaccgcttgctgataaccctgcggtttgacggagatttgataacgaccgcgatactgctgatcttcatcaagacggttccactcaacccagtcggtgttcagcgtctggctcgcatcatcgcgcttggcgataacgtagttcttcgcctgaagaatactggtgacctgtgcccacagcgaaccgctgcggccgttctcgaccatcagcgtcgcggtatcgccgttaaactgggtccgcgcaccgctcaccagcgccagcggctgcgccggcggacgaatgtccagcgctttaccgaccgcgccggtgctgttagccaccggaatattgtaatcacccacctgaatcggcaggatcatccccgccggcgcatgaagttcgctcaacggtgatgcctgtaaataggcctcatcaccgctcacctgacgcttatagcgcgagtcagaactacaggccgcgaggagtagaaccagcgaaacacccgcaaccttcgccaggcgcgacttctgtactgagtaagccatcaaatctccctaaactttacagcaaaccggcatgcttcagcgcggcagtgacggcttcacgaccatgatcggtgataggcgtcatcggcaagcgcagcgtatcggtcgccacaagacccaacgccttgcatccccatttcaccgggataggattgggttcgacaaataattttgtatgcagtggcatcagacgctggttaatcgcacgagcttcggcaaattgacccgccagcgccagacggcacatgtcggccatttcgcgcgccgccacgttggccgtaacagaaatcacgcctacgccgccgagctgcatgaagtccataccggtcgcatcgtcaccgctcagcagaataaagtcgtctgaaaccagctctttgatctggtgaacgcgacttaagttccctgttgcttccttaataccgacaatatttttaatttccgccagacggccaacggtttccggcagcatatcgcaaccggtacgggacggcacattatacagaatttgcggcaggtcagtatgttcggcgatagctttaaagtgctggaacaggccttcctgggtcggacggttataataaggagtgaccgtcaggcagccgacaacaccgctatcgttaaaacgtttggtcaggctaatcgcctctgcggttgcattggctcccgttccagcgataaccggaatacgcccgtcggccagctccagcgtcatcatcaccacgtcgccatgctcttcatggctcagcgttgcggattcaccggtagtccctaccgaaacgatcgccgaggttccgttggcgacatggtaatcaatcagttttttcaggcttgtccggcagacattaccgttttcatccatcggcgtgacaagcgctacaatacttcccgtgaacatgggccatcctcagagcagaagtgcgacaagattctcaatgttacgtttggagctgtaataaaagcaagagacccgacgccatcagggatgttgtatggcggttttttttatgctttcctaatgttacctcacctttttaaaggaagaacaggtttgacagcctcattacaacactatctggttattaccgccctgggggctgaccgtcccggcatcgtgaatacgatcactcgccacgtcagcagctgcggttgtaatatcgaagacagccggctggccatgctcggtgatgagtttacgtttatcatgctgctttccgggtcgtggaatgcgattaacctgatcgaatcaactctgccgctgaaaggcgcggagctggagctgttgatcgtgatgaaacgcaccactgcgcgcccgccgcaggccatgccaaacaccgtttgggtccaggttgaggtgccggactcaccgcatatcatcgagcgctttactgccctgtgcgatacatggaatatgaatattgcggagctggtgtcccgcacgcagccgggagacggcgattccgcgcagctttttattcagataactgcccacagtcctgcgacgcaaaatgcagcaaatatcgaacaagcgttcaaagccctatgtacagaactgaacgcacaaggcagtattaacatcgttaattattcacagcatgatgaacaggatggagtttaacccatgaccccactgaaagccggtgatatcgcaccgaaatttagcttaccggaccaggacggcgaggaagtaaatttaaccgacttccagggacaacgtgtcctggtttatttttacccgaaagccatgaccccgggctgcaccgtacaggcgtgcggcttgcgcgataatatggacgacctgaaaaaagccggcgttgaagtgctgggcatcagcaccgataaaccggaaaaactctcccgtttcgccgaaaaagagctgctgaactttacgctgctgtctgatgaaaaccatcaggtttgcgagcagtttggcgtctggggcgaaaaatcctttatggggaaaacctacgacgggatccaccggattagtttcctcatcgatgccgatggcaaaatcgaacacgtctttgatgatttcaaaaccagcaatcaccacgacgtggtgctgaactggctgaaagaaaacgcctgatgcaaagcaagacgccgggagaggaagccctcgcccggcgtctttttttattctcattgccttagtcgtcgaccgccaaaccatccggccaggcatgcaccacagctttaatcagcgtggccagcggaatggcgaagaagacgccccagaatccccacagtccgccaaagatcaccaccgacaggataatcaccagcgggtgtaaattgaccgcttccgagaacagcaccggaaccagcaggttaccgtccagcccctgaataatcagatagaccgcaaacaggctccagaactcggtgccagcgccaaactgaaacagcgccacccccaccaccggaatggtcaccacaaacgcgccgatataggggatcagcaccgagaagcccaccagcaccgccagcagcaacgagtagttgaggccaaagagaataaagcctatccaggtggcgacgctgacgacaatcatctccagcaccttgccgcgaatgtagttggtgatctgctggttcatctctttccacacctgcccggcaagcccgcgattgcgcggcagaacgcggcgcaccgcgttgagcatctgctctttatccttcagcaggaagaagaccatcagcggcaccagcaccagatagaccgccagggtgagtaaccccaccagcgaggccagagagtacttaaccaccgagtcgcccaccgtcagcatccgggtgcgcatattttccgccatcgcatcgataatgccggcatccattaacgccggatagcgccgcggcagcgtggcggcgaaatcagagagcttatttagcatgcccggcatatcgcggatgaggtagatcccttgctgccaggctaccggcagcaccacaaaggccagcaacagcaggatgcccacaaagaggatcagcaccagcgaggtggcccaggtgcgcgacagaccgatgcgctccagacgaacggtcggccactccagcagatacgccagcacgatagccaccagcaacggggccagcaggccgctgaaaaagaacataatgccgaaaccggcaagcaaaataaccagcagcgctatcgcctcagggtcgctgaatcgacggcggtaccactgcattaacatctcaagcataaaaccttccctgaagggccaagcggcgacaatccgaggaattgtatcgaaatgtcacaaaaaagacttcgctttttgatgcgccgcagtcaaaccgttctccgccatgaagaacatattttcaaggcggccaacgccagctaaactcgctgggatgcggccagggaacattacgccgcacaatcggtcaaactggcacacccacattacaggacagaggttatgttcaggcagttgaagaaaacgctggtggcgaccgcgatcgcgtcgctgacgctgggttcgataggtcctgcttttgctgactccgcagataccctgccggacatgggaacctccgcaggaagcacgctgtcaatcggtcaggaaatgcagatgggggattactacgtccgccaactgcgcggtagcgcgccgctgatcaacgaccctctgctggtgcaatatatcaacgggctgggtatgcgtctggtggctcacgccaactcggtgcgtaccccgttccacttctatttgattaataacgaccagatcaacgccttcgccttcttcggcggcaatgtggtcctccactccgccctgttccgctactctgataacgagagcgaactggcctctgtcatggcgcacgaaatctcccacgtgacgcagcggcatctcgcccgcgcgatggaagatcagaagcgcaatgcgccgctgacctgggtcggtgccctgggttcgattctgctggcgatggccagcccgcaggccggaatggcggccctgaccgggacgctggccggcacccagcagggtatgatcagcttcacccgccagaacgaagaagaggccgaccggattggcattcaggttctgcagcgctcgggtttcgacccgcaggctatgccgatgtttatgggtaaactgcttgacgagtcgcgctactcgacgcgaccgccggaaatgctgctcacccaccccctaccggaaagccgactggccgatgcccgtaaccgtgccaaccagatgcgcccggtggtggtacagtcctcggcggacttctatctggcgaaggcgcgtaccctcgggatgtacactaacggcgacaacaagctgggcaccgatctgctgaacgcctgggataaaggcaatatccgccaacagcatgccgcccagtatggtcgcgctctgctggcgatggaaagcaacaactttgaccaggcacgcaaaacgctgcagccgctgctcaacgccgacccgcaaaatgcctggtatctcgatctggccactgatatcgacctcggacagaagaaaaccagcgacgccatcaatcgtcttaaaaacgcccgcgagctgcgtactaatccggtgctgcagctgaacctggccaacgccctgctgcagggcgggcagcccggggaagcggcgaccattctgaaccggtatacctttacctataaagaggatggcaacggctgggacctgctggcccaggcggaaggcgcgctgggcaatcgcgatcaggagctggcggcgcgggctgaaagcatggcgctggtcggccagctggagcaggcgatttccctgctcagcagcgccagctcgcaggtgaaactcggtagcctgcagcaggcacgttacgatgcccgtatcgatcagctacgcgatctgcaggctcgcttccgtccctatcaaaaaatgtaaggagaccccatgaccgacgcggtaaaaatttaccataacccacgctgctccaagagccgcgaaacgctgagcctgctgcagagtcgcggcatcgatcctgaggtggtgctttatcttgagacgccaccggatgccgggacgctgcgccagctgctgcagctgctgggtatggagagcccccgcgagctcatgcgccagaaagaggatctgtataaatcgctcaatctggccgacccggctctcagcaacgcggcgctgatacaggcgatggtcgacaatccgaaactcatcgagcgccctatcgtcgtcagccgcggccaggcgcgtattggccgcccgccggaacaggttcttgagatcgtaagctaactcacccgcgccgcgcttgcgcggcgctttttttacgtgggcgattccagatctttcacgccaatatctcccgcccgccggacggtgctactgttcatccatcgctcaatccactggacggatgaacatgaaaaagccgacctccacgccccatgacgccgtgtttaagacctacctctcccatcccgataccgcccgtgatttcctgcaactgtatctgcccgagacgctgcttaaagtgtgcgatctgcgtacgctgcatctcgagtccgggcattttgtcgaagacgatctgcgtcccttttacgccgacattttgtattccctgaaaaccacggcgggcgacggttatatttatgcgcttatcgaacaccagagcacgcccgaccggcatatggcctttcgtctgatgcgctacgccatcgccgccatgcagcgccatctcgatgccggccacgatcgcctgccgctggtgatccctgttctcttctaccacggtctggtgagcccctatccgttctctctgcgctggctcgatgaattcgtcgctccggagctggccggccacctttatcacggggcgtttccgctggcggacataaccgtcattccggatgacgagattgccacccaccagcgcatggcaacgctggagttactgcaaaaacatattcgacaacgcgatctggcgcagctcctcgacaagctgagcgaattattattgactggactggcgacggaatcgcaggtacaagccctgatgcactatctggtacaggcaggcaacacgcgcgagccgattaaattcattcgcgagctggcgttacgtacgccgcagcataaggagacgttgatgacgattgcggaatatctggaacaacaggggctggagcggggcctggcgcaaggccgtcaggaaggacggaaagaagaggcgcagcgcatcgctgtcgctatgctgcacagcggccttccgcgcgacctggtcgcccggttgaccgggctgacggagcaggagctgactcccctggcggactaaagcttaaggatctctttcacgaaggggatcgtcagcttgcgctgagcggtaatcgaggcgtgatccagctgatcgagggtcataaacagcgagcgcatctcgcgatccagccgcttcagcaggaagcggcacacgtcttccggcatctcgaagccgcgcagtctggcgcgtagctgcagcgcctgcagtttgtcttcatccgacagcggctgcagcttatagatctgcccccagtccagccgtgaggccagatccggcaggccaagattcagctgccgcggcggccgatcgccggtgatcagcagccgggttttgcctgattccaggatccggttatagagattaaagatggccatctcccagggctcatcgccggcgacgcactcgatgttatcgatgcacaccagcgccagctgttccatcccctccagcacctcgggcacaaaccacgtccgtttatccagcggcacgtagcctaccgcatccccgcgctgggaaagctccgcgcaggcggcgtgtaacaggtggctacgacctgccccttcacgtgaccagatataaatgtacccgctgtgttcctggcgcagtacgttctggagggcggcaagtagggaaggattatcacccggccagaaactcgcgaaggtttcgtcgtcaggaagatacagtggcaaagagagctgtgccggtgcgttcagatggacctcaacataggcttacagaaaaacgcgaagagtttaccacagatttaggtcaggagagaaccgggcgggatcgccgcccggtcaggcgatcgttatttaaactcttcgctatccgccgcgtcgaggaccacctcttccggacgcaggacgctgataagcttgaaaatcaggctgagggcgatgcccacgatagtcgccagcgccatccctttcagctcggcggcgccaatgtgcactttagcgccgctaacgccgatgatcaggatcacggaggtgaggatcagattctgcgctttactgtaatccaccttcgattcaatcagtacgcggatccccgaggcgccgatcaccccgtacagcagcagggaaacgccgcccatcaccggcaccgggatgatctggatagccgccgccagtttgccgacgcaggagagcagaatcgcaatgatcgccgcgccgcggattacccaggtgctgtagacccgggtaatcgccatcacgccgatattttcaccgtaggtagtgttgggcgtcgaaccaaagaagccggaaacgatcgtcgacaggccgttggcaaacatcgaacgatgcaggcccgggtcgcggatcagatcgcgcttaacgatattggcggtcaccaccagatgccccacgtgctcggcaatcaccaccagcgcggcgggcagtatggtgaagatagcaaaccactcaaagcgcggagtgtagaaagtcggcagcgcgaaccaatgcgcctcggcgatcggggtggtatcgaccacgcccatcacaaacgacagcgcatagcccaccagcacgccgatcaggatcgggataatcgccaggaagccgcggaacagcacggatccgaacaccgtcaccgccagggtcaccatcgagataataatggttttactgtccggtgactggccgtcggccggcagcagcccggccatattagccgccacgcccgccagttcgaggccgataaccgccacgatggcacccatcgccgccggcgggaacatcacatccagccagccggtaccggcttttttgacaataaaggagacgaggcagaacagcacgccgcacataataaagccgcccagcgccacttcgtagcccagcggcaacagcagcagcaccggggagataaaagcgaagcttgatcccagataagcgggaattttgcctttacagataaagaggtacaacagcgtaccgatgccgttgaacagcaggacggtggccgggttaatgtggaacagaataggcaccagtaccgttgcgccaaacatggcgaacagatgttgcaaactaagcgggattgtctgtaaaagcggcggtctttcactcaccccgatggcacggcgcgtcatagtgtattcctctgagagtcgtctgttatttgctgtggattacttttattcaaaaaaaagccgactctcaaagtcggcttttttcgcggtatattttatttcgttccaaaaatcttgtcgccggcatcgccgagaccgggaatgatatacccgtgctcgttcagtcccttatcgacagaggcggtgtacagctcaacgtccgggtgggctttctccagcgcggcaataccttccggcgccgccaccagcaccagcaccttgatgctggtgcagccggcgtttttcagcagatcgatagtggcgatcatcgacccaccggtggccagcatcgggtcaacgaccagcgccatacgttcatcgatattagacaccagtttctggaagtaaggcaccggctcgagggtttcttcattgcgatagataccgaccacgctgatacgcgcgcttggcacgtgctccagcaccccttccatcatgccgaggccagcgcgcaggataggcacaacggtaattttcttgcccttgatctgctcgacttccaccggaccgttccagccttcaatagtgactttctcagtctccagatcggcggtggcttcataagtcagtaagctgcccacttctgaggcgagttcacggaagcgtttggtgctgatgtcgtgctcgcgcatcaggcccagcttgtgtttgacgagtgggtgtttgacttccacaatcttcattctctttctcctctgaggggcagccacaaaaaaaatcgcgggattataccgctttttgcggattgtgccatacccatcttgcttgacgtatatcaagcaaagtgatttagagacaaaaaaaccggaggcgaggctccggcttgggtgcggggtgcagtccatacgcttacgcgggcctacgtgtattgtaggtcggttaagcgttagcgccacccgactacgacagcttctccccgttgctggcaattacctgctgataccaggcaaaggactttttccggctgcgtgccaacgtgccattgccttcattatctttatcgacataaataaagccgtagcgttttttcatttcccccgtgccggcggaaaccagatcgatacagccccagggggtgtagcccatcagatcgacgccatcctcgaccaccgcctttttcatctccgcgatatgggcggagagataatcgatacgatactggtcattgacgctgccgtccgcttcgcggacatcaatcgcgccaaagccgttttcgacaataaacagcggcagctggtagtgatcccagaaccagttcagcgaatagcgcaggccgaccgggtcaatctgccagccccagtccgactttttgacgtacgggttggagaccaggctggtggtttcatcataatcaagcaaggggttgtcttcggtggctttggtagcgaacgacatatagtagctaaagccaatgtagtcgacacagccctcggttaacgcctgacgatcggcttcggtgatatccagagtaaagccgcggcgggcaaaatagttgagcagatgctgcggatagcgaccgcgcacgtggacgtcggtaaaccagtaacggcggtgcatggcgttcatcgccatcatcatatcgtccggggcgcaggtcagcggatagatggggcacatagcgatcatgcagccaatctgcagcgccgggttgatctcgcgcgccgctttcaccgccagggcgctggccaccagctcatagtgcgcggcctggtacatcaccggttcccggtcttcatccggcaaatatttcaaaccggagttggtgaagggggcaaagtcctcatggaagttggcctggttgttgatctcgttaaaggtcatccagtacttcactttatgttgatagcgggtgaagacgaccctggcaaagcgcacgaaaaagtcgattagcttgcggttgcgccagccgccgtactcggtgaccagatgataaggcatttcaaaatgcgacagcgtaatgactggctcaatgccgtgtttcaggcattcgtcgaacagatcatcataaaactgcaggccagcctcgttgggctccagctcatcgccctgcgggaaaatacgcgtccaggcaatcgaggtgcgaaaacatttgaagcccatctcggcaaacagcgccaggtcttgtggataacgatgataaaaatcgatcgcctcatggttcgggtagtttttcccggccaccacgccgtcggtaatttcccgcggcacgccgtgggcgccggcggtcatcacatccgccacgctgatccccttgccgccctcctgccagccgccctctaactgatgcgctgcgaccgcgccgccccacagaaaacctgctttaaatccggacatagtctctccctaatgtcgatcgtcgtctggcgaacgatacagctgattaaaatggtaaaccgcaccaatcaggccggcatcgttaccgtgactgacggtatcgagatagtcggcaatgccgaaccaggccagatgctggcgcagtagcgtcagaaatcctgggcgttccacaacgccgccaccgataaaaatggtctgcggatcgaagatatggacgaggttataaaggccatggcccaggccattgaagaactcggcgaccagacgctgacaaaccgggtcgccggcgtcatagcggtcgaaaatcagttcgcctgtcacgctatccagcggcgcgccaatatattgcgcatagcgatggcgcagcacccgcagagtgcagttctcattcattgaatagcgacgaggatcgcgtccgccgggacggtcggtaagcatatagccgaattcgccggcacgaaaacgcgccccgttgatcagctggtgttggcagaaaatcgccccaccgatgccagtaccgatagtgagcaccagaaaattggccatctccgccgctttgccctgccagcgctcggccagcagcacacagttggcgtcgttttccaccgagaccggcagcccggttcgcgtctcgagccacgatttcatggcgaagttatcaaatcgacggatagcgccgcccatggtgataagaccgctgtgcggatcgatatagcccggcgcgctgatggctattccttcacacgacggatgggccgccagccacgacagcattgcctgtaagatccgatcgccatcgctgtcattgattgactgcctggcggtttccagcagcctgccgtcgcgggtcatcacgcccatctttaacgcggtgccaccgatatcaaatgccgcaatcttcattcatccctctcctgacccgcgtcaatcaccgacaaaatgcgtggcaaaccaacaaggaaaccggtttcagtcgtataatgaggattcctttacgtagaggcaagcaccagactgtacccggtttcattttcgtgagcagtatcaaatttaaccattcatcagcggttttacgccaactgtaaagcaggctcgcaaacgtttgctttccctgttagaattgcgccgatttttcttgcttaccgcaaacgcgtggagacttcgcagtgaccgataaaacctctctcagctataaagatgccggcgtggatattgatgcaggcaacgctctcgtcgaccgtattaagggcgtggtgaagaaaacccgtcgcccggaagtgatggggggactgggcggattcggcgcgctgtgcgcactgccgcagaaataccgcgagccggtactggtctccggcaccgacggcgtcggtaccaagctgcgtctggcaatggatctgaagcgtcacgacaccatcggtatcgacctggtcgccatgtgcgtgaacgacctggtggttcagggcgctgagccgctgtttttcctggattattacgccaccggtaaactggacgtcgataccgcagccagcgtcatcaacggcatcgccgaaggctgcctgcagtccggttgcgcgctggtcgggggtgaaaccgcagagatgcccgggatgtaccacggcgaagattacgacgtggcgggtttctgcgtcggggtagtggaaaaatcagaaatcatcgacggcagcaaagtgaccgatggcgacgtgctggtggcgctggcgtccagcggcccgcactctaacggctattcgctggtgcgtaagatcattgaggttagcggcgttgacccacaaactaccgaccttgacggtaaaccgctggccgaccatctgctggcgccaacccgcatctatgtgaaatcggtgcttgatctgatcgccagcgttgacgtccacgctattgcccacctgaccggcggcggcttctgggaaaacattccgcgcgtgctgccggataacacccaggcgatcatcgatgagtcctcctggcagtggccatccgtcttcaactggctgcaaaccgccggtaacgtcagccagcatgaaatgtaccgtacctttaactgcggcgtagggatgattatcgccctgccggcagcggaagcggacaaagcgattgccctgctgaatgacaaaggtgaaaacgcgtggaaaatcgggtatatcaaagcctccgattccgaacagcgtgtggtcattgcatgaaaaacatcgtggtgctgatttccggtagcggcagcaatttgcaggcgatcatcgacgcctgcggccggaaacagataaacggcaccctgcgtgcggtattcagtaacaaggctgatgcgttcggccttgagcgcgcgcgcctggccggcatcccggcccatgcgctggcgcaaagtcagtttgccgaccgggaagcgttcgatcgtcagctgatgcatgaaatcgacgcctacgccccggatctggtggtgctggcaggctatatgcgtatccttagcccggcgttcgtcagccactatcagggacgtctgctgaacatccatccctcgctactgccgaagtatcctggcctgcatactcatcgtcaggtgctggagaacggtgacgaggagcacggtacctcggtgcacttcgtcaccgatgagctggacggtgggccggttatcctgcaggccaaggtgccggtcttcgctggcgacagcgaggaggaaatcacggcgcgggttcaggcccaggaacatgccatttatccgctggtcatcagctggttcgtcgatggacgtctgcgcatggcaggcaaccacgcctggctggatgagcgacagcttcccccgcagggctatgccgccgacgaatgaacaaccagccccgcatgagcacatcgcggggcttttttttaattaaaagtgtttactaatcaaacatctcacagaaataattcttcttactgtcatattgttgtgacacagtaaatcgctatgcagaaaaattcgtcataatagtctacgtcctgtgagtaaaacggagtgtgagcggtaatgggccaggaaaagctatacatcgaaaaagaactcagctggttgtcttttaacgaacgcgtgctgcaggaagcggcggacaagagtaacccgctgattgagcgcatgcgcttcttaggtatttactccaacaacctggatgagttttacaaagtgcgcttcgctgagctgaagcgccggattattatcagtgaagaacaaggcagtaccgcccattctcgccacctgttaggcaaaattcaggcccgcgttctgaaggccgatcaggaattcgatagtctgtataatgaactgttgctggagatggcgcgtaaccagatcttcctgatcaacgagcgccagctgtccgtcaatcagcaggcctggctgcgcaactacttcaagcagtatttacgccagcatatctcgccgatcctgatcaaccgcgaaacggacctcgtgcagttcctgaaagatgattacacctatctggcggtggagattatccgcggggaaaacatcaactatgctctgctggaaataccgtcggataaggtgccgcgcttcgtgaacctgccaccggaagcgccgcgtcgccgcaagccaatgatcctcctggataacatcctgcgctattgcctggacgatatttttaaaggcttctttgattacgatgcgctgaacgcctactcgatgaagatgacccgtgacgccgagtacgatctggtgcatgagatggagtcgagcctgatggagctgatgtcctccagcctcaagcagcgcctgaccgccgagccggttcgcttcgtctaccagcgcgatatgccggatgcgatggtcgaaatgctgcgcgataagctctccatttccaactacgactcaatgctgccgggcggccgctatcacaactttaaagactttatcggcttcccgaacgtcggtaaggccaatctggtcaataaacccatgccgcgcctgcgtcatctgtggtttgataaattccgcaacggcttcgacgccattcgcgaacgcgacgtgctgctctactatccctatcacacctttgagcacgtgctggagctgctgcgtcaggcctccttcgaccccagcgtattggcgatcaaaatcaacatttaccgcgtggccaaggattcgcgcattattgacgcgatgatccacgccgcccacaacggtaagaaagtcaccgtagtggtggagctgcaggcgcgcttcgatgaagaggctaacattcactgggcgaaacgcctgacggaagcgggagtccacgttatcttctctgcgccaggtctgaagatccacgccaagctgttccttatctcgcgtaaagaaggcgatgaggtggtgcgctacgcccacatcggcaccggtaactttaacgagaagacggcgcggatctacaccgactattcgctgttaaccgccgatgcgcgcattaccaatgaagtccgccgggtgtttaactttatcgagaacccctatcgtccggttagcttcgactacctgttggtgtcgccgcagaactcgcgtcgtctgctgtatgagatgatcgatcgcgagatcgccaatgcgcaaaacgggcaaccgtccgggattacgctgaagctgaacaacctggtggataaaggtctggtggaccgactgtatgccgcctccagctccggcgtgccggttaatctgctgatccgcggcatgtgctccctgatcccgggtctggaaggtatcagcgaaaatatccgcgtcatcagtattgtggaccgtttcctcgagcacgaccgggtctactgttttgaaaacggtggcgataaacaggtctggctctcctctgccgactggatgacgcgtaacatcgattatcgcatcgaagttgccgctccgctgctcgatccgcgtctgaagcagcgggtgctggatatttttgatatcctgttcaacgatacggtaaaagcgcgctatcttgataaagaactgagtaaccgctatgtgccgcgcggcaatcgccgtaaagtgcgcgcgcaaatggcgatttacgattatctcaaatcactcgaacaacccgactaacctatgccaataaacgataacacccctcgaccgcaggagttcgctgcggttgaccttggttcgaacagttttcatatggtgatcgcccgtgtcgtcgacggcgccatgcagatcatcggacgcctgaaacagcgcgtacatctggccgatggcctcgatgaaaactcggtgttgagcgaagaagccatgacccgtgggctgaactgcctgtcgctgtttgccgaacgcctgcaggggttctccccctccagcgtctgtatcgtcgggacgcatacgctgcgtcaggcgaccaacgcggcggagtttcttaaacgcgcggaaaaagtgatcccctacccgatcgagatcatctccggtaatgaagaagcgcgcctgatttttatgggcgttgagcacacgcagccggagcgcggccgcaagctggtgattgatatcggcggcggttcaaccgagctggtcattggcgaagattttgagccccgcctggtggaaagccgccgcatgggctgcgtgagcttctcgcaggcctatttccctggcggcgttatcaataaagaaaacttccagcgcgcgcgcctggcggcggtgcagaagctggagacgctggcctggcagttccgtattcagggatggaccgtggcgctgggcgcctccggcaccattaaagccgcccaggaagtgctggtggcgatgggcgagaaggacggatttattacgccggagcgcctcgagatgctggtaaatgagctgttgaagcataaaaacttcgacgcgctcagtctgcccggtctctcagaagaccgtaaagcggtctttgcgcctgggctggcgatcctctgcggtgtgtttgacgcgctggccatcaaagaacttcgtctgtccgatggcgcgctgcgcgaaggtgtcctgtacgagatggaaggccgcttccgccaccaggatattcgtagccgcacggcacagagtctggcaaatcagtacaacatcgatcgcgaacaggcgcgccgggtactggaaactaccacccagatgctggagcagtggcaggagcagaatcccaagctggccaatccgcacctcgcggcgctgttgaaatgggcggtgatgctccatgaggtagggctgaatatcaaccacagcggcatgcatcgtcactcggcctacattctccaaaatagcgacctgccgggcttcaatcaggagcagcagatgctgatggccaccctcgtacgctatcatcgcaaagcgatcaagctcgacgatctgccgcgctttacgctattcaggaaaaagcagtttctgccgctaattcagctactgcgcctgggcgtactgctgaataaccagcgtcaggctaccactacgccgccgacgctgcgcctgcagacggaagctcaccactggacgctgacgtttccgcacaactggtttagccagaatgcgctggtgctgctggatctggaaaaagagcaacagtactgggaaggcgtgccggaatggatgctgaagattgctgaagaagagccagacgcctgatcgtatctttggctatcaaccgagccgggcgcttacgcccggctttttgctgttcagccggtcatctcctccgccaactgcgtcagaggtaccggtaccccgatatcatagccctgcatataatcgatccccagcgtgatgaccgcctgacgtatttccggcgactccacatattcggccaccacctgcatgttcttcatacgcgccagacgacaaatagagtccacgacctggtaatcaagactgctggcaagcagattgcgaataaaactgccgtcgattttaagaatgtcgacgttcattgtttttaaccgggcgtagctggcgtagccggtaccaaaatcatcgatcgccacccggcagcccagcgcccgcagatgctctaaagtctggcagaccagctcgggattgctgagcgcgtagttctcggtcagctcgaaaataatctgccatggctcaatgttgtaggcctgcagcagcgcttcgacctcctgaggaaactggctgcggctcagcgacaccggagaaagattgatcgccagccgcagaccgggcagcgcccgccggttggcgtccataaaggccagcgtatgctcaataacccactggtccacccgcgtggacagcccaaactcgtgcgccaccggcaagaactcgtttggccccgttagctcacccgactcccctttcatcctcaccagcacttcatgatagcgatcgccgcgaatgccctggataggctgcgccatcaggacaaaatggtcatgttccagcgctttgagaatgcggttcatcatcacgactttatctttcagatcctgctgaacatggcccgcgccgcggcgctgtaaattttccggatggccgctggctaacgacatgtcggcaatggtgttcaactcgccaagcagtaaatacagatgcttgaccggcgagcgaacgttgcaatagctcatgccgatccgcggctgcagggggaccccgtcccagtggaaacggaactgtcgcagggagcggtcaattaagtgaatgcgcgcctggtgcccttcgctattgagacggaacactaaatcgtgaccggcaagatgatataccgcttcgttgggctgcagcagcgttctcaggtggttcgccagcatttgcttatactggattcgcaaaagtaccccatagtggcgccccagcagttcaagctcaggaatgcgcagaaaacagagcgtcgaccagctcgtgccgttgagcgcccggctcagcgcccgcaagttcggcatatgaaccaccgggtcgaggaaggccatctgccggacgcgagcgtagatcagccgctgctgtgtcgccagcatcgccgtataggcgacaataaacgagaataccagatagcttgatgaggtgatcgccaactgggtgttatagcttgggtaaattggtaagtaacggtaatgaaaatggatcacggcaatcagcaccggcgtccagatcagtgagataaagcgatagccaaaacgcatggcaccccagagcatcaccggcatcagcaatgacaacgtataattcgtactaaatatggtgctgctatcattaagcggcatcaataatagccacagtagcagaattaataccgtcgcccagcaaataatttcaattttttttatttttggatcaatttgtaagcgaacctgagaaataaagccgcgtaaatgaaaaggattacgaatgacccgtaacacaaaataacacagcggcatgccggtcaggcaccctaccattagcgcctgaaaggtgattaatgaacgtaaactaaatggcgtaacgccggtcatttccgttgtgcgcggatggagtccaagatattcggcaatctgtgacaaaatcagaaaaatgaccgaggggagcagcatttgccagaacagacgatgcggcatcagtcggacgttgccgtgtgagacctgctgacgctgggggacaaaaatgcggtagccgccccagcagagcacgcaggggataaggaaatggaacagtacaccgatggactgctcaaacatcatgccgtgggccagagttaacagcaggccaataataatgccagggatcgccgcccaaccaaaaaacatcatcaggctgagcaccagcgccaggggaagataatacaaaaataccatatgaccattgagcatggtgtaggtattcgcccatctggcgaccggtaataacagcgcaggcagaacgagcggtaaagcccaccacttgtcgcgatattgttgatagtattttaataaattcataggtgctctacagagtgcctctgctcccgcgaggcatattcaggcaggcatccaaccacccatgctgaccgcgtaaataataacgacacggtaacgtccgctgattttagtggccaagagaaggagactattgatataaatcaacaaatgctgacgccaacattaataaatcttatttttcccgacatttcacggctaataaagtgagcatgtaaatacgacgattatcttatataacattaattaatgttttcactgccgcacttttacatctgcatcaattgaccccatctcgttcctgtgccttaatacccccatcgcccatcttcgggtatacttcaaggatccttttgtgagtcaggcacccagtatgcgtaaacgacatcgatttaaccgtcgcatgacccgtatcgtactgcttatcagctttctcttcttctttggacgctttgtctactcctccatcggcgcctggtaccatcatcaggataaaaaagcgtcgcaggagtcatcgctcaccgtcgagccctccccccgcgagtaatcctttgattctaatactgcaagcgccacactccgcaggcagagccgctcgctgctgaagtactgtctttgatgcggtaattttgccgtcggcgatttataagcgcacggtatgcagcaggcgcagcatttcagcgataccttttgtcacaattttgtcctgacgcatgactaccgccagctgtcggtatagccgcggcgccagcgagtgtacgcgtaatccgtcgcgatcctccacccgctccaccgccatgcggggcacgatgctgtagcccagccctgcccgcaccatgcgcttaatcgcctcgatgctccccaactgcattaccggcgtcaccgccagtcccgccgagcggaaccagcggtcaatcagatcccgcgtgccgctacccgcctcgaaggcaatgagcggctgcgcctgcagctcggcgggagtataaaccgccggcatctccgtctcgcggctggcatagatggtcacgaactcctcatctaacatcgcagtcaccgccagactgcgcccctgcacgggcagcgtgaccagcccgagatcgagccggttttcttccaccgcgcggacgatatccagcgtgttgccggtggtcacccccaccgtcagcagcgggtgctgctgacgaagatgctgcagcagcggtggaagaagatgaatgcaggccgtcgcgcctgtccccagcgtcaacgatccattaacctcctgactgaatgcgctgaccgactgcaccgcgctattcaccgcccgatcgatctgctcgctgtgggccagcaatgtcattcctgccgccgtcgccttgatcccacgtccggttcgctccagcagcctggtctgtaaaaactgctccagctgacgtacctgcaggctgacggcaggttgggagatccccagcgcgtcggcggcggcagaaaagctgccgcgctgtacgaccagccggaaggtcgccagatttcccaggttcagtgttgtcataaaagtttctcttataccgcgcataaggtggccgctctgccagaacaatagcctgccgggtatgctcaggacaactgtcttaacggaatgaaaaaccatggaaataaacgctattccccgacgccttgccttcaccgcgggcggtcagcaactcatcaactgggggatctctttttatatgcccggcacctttgccggggctattgccgccgacaaaggatggtccttgccgcagatctatctcggcctgacgcttgcgatgctgatgatggccgctgtctccccgttcgttgccaggctgctggctcgctttggcggaagactggtggtcaccagcggtaccttactgatagccgccagctgcgccatgatggcctggcgcccttcgctggccggctggtacggcgcctggctgctgaccggcatcggcatgcggctctcactgtatgatgcgctgttcgccgcagtggtgaatctgtacggtcagcaggcgcggaaaactatctctcatatcactctcgctggcggtctggcctctgccctcttctggccgctgggcgaggcgttattaaccatcatgccctggcagaatgccctgcggatctatgcgctgtttggcctgctgagcgcatggctgagttatcaactgcctcgccagcggctcaattcagcggcgaaatcaccagcctcgccagcgacagcagagggcgaccggcgtaacggggcgcgttacgcgatctttattgcgctgatcaccttcatctctaacggtacctctacccatctgccggagtttatcagccactttggtctgccggttgccgtcggtgtgctgtggggattcggccagaccggcgcccggctgggggaagtgctggccggtccccgggtcacctcactcacgctaacgcgttttactgcgctcgccatgccgctctgttttctccttggattgagcagcacgacctttgccggatgcgcagccgggtttgtgctgggctatggcgcgattaacgggctggtgacgattgtcaaagcgacgctgccgctggcgctgtttagcgcagaaagctacgccagccgcacgggtctcctgctgatccccgggcaactgatggcagctgtttcaccctttgcctacgcatggctgaaccaccggctgggcattatcggcggaatgtgggtgtccaccgggttaacgttgatcgttaccggactggcgctggcgattgtgcgcgaggcgggtaaggcgcaggatgaacgtaatgtagaatatccggcagcggccgttgaccaaccgatagccaaaaacaaccttgctgaagagtaaacgtggatcactacgcccttgataatttacgcctgcgcttatagccatatggcaggcattattcatactataaatttttaatgaaaatacattcaccaaatcaataatgaaatttttaagagaatagcagggcatgctgtcacctgcgaaaaataacgataccgcctgtatttttcgcttgcataatgatccaaaaaataaagccagtcgccatcggtaacattagccacacctccggtaacacaattagctttactctcttcctcatcgaaaacgttcgagcatagcaaagaatgagcgctaattttaataccgtagcaaaacccggcggcaatcgatgcaatctggcctgtcggtattgcttttatctggaaaacgaggttccgcgtccagggtatgccaccatggacgacctcacgctggaagcgtacattcacaacaccatttcatcgaccccctcgcaaaacgtcgagttttgctggcagggcggtgagcctaccttatgcgggctggatttttttgcaaaggtggtcgagctccagcagcgttaccgtggtaacaaaatcatcgccaacagcctgcaaaccaacggcatcttgctgaacgataaatgggctcgttttttgcgtcgtcatggatttctggtcggattatccattgatggccctgcgtcactccacgacacctggcgtacgacgggctgcggaaaacccacctgggaaaaagttgtgcaggccatacgctgcctgcagcagcatgacgttccggtaaatgccatggtggtggtcagccgccagtctgcaagccaggggaaaagtctctatcgctgcctgagccgcgagctaaaccttcaccatctccagtttattcctctcgttgactcccctgctccctggtcagttacccctgagggctggggcaaatttttgtgcagtgttttcgacgactggctggaaaacgatgttggcagggtgtttatccagtactttgataatctgctcggcgtatgggccggccagcccgccacgctctgcaccatgcagcctgtctgtgggcagagtttactggtggagcaaaacggcgatgtctacagctgcgatcactttgtctcagcggaatataaactgggtaatctgaagcaagatgctatggcagcgatggcgagctcgccatttcagcaacagttcgggaagcaaaagggccaactctctgcccgctgtcagagctgccactggcgctttgcctgccatgggggatgccctaaacaccgttttaccatccatgacgacgaagcacagaattacctgtgcagcggctatttaacttttttcggccatatcacgccctatatgaacgtcatgcgaaggcttttattaaattgccagccgcccgcgctcattatgagtcttatcccggagattcggcaaaatatattacaattaacggagtctgaagatgaaagaaccaaataaaatagatggaaatcgccgcgatctcctcaaaggtctggggattgccgctgtcgtgagcctgttaccagagacgggaaacgccgcacaaaataatgccgccccgaaagcggcatgggatattcctttcaccggcgaaatccctgacacactgcccgaaggctacaatattttactcataacctgcgatcaggaacgttatttcgagcggtatccctttccggtgccgggccgggaacgcctgatgaaaacgggtatcacttttaccaatcatcagaacacggccaacgtttgtacgccatcgcgctctgtcatgtacaccgggctccatatgccgcacacccggatgtttgataatcttggcttcccctggatgaattacgatctggacccggaattacgtaccgtgggccatatgatgcgtgaactgggttattacacggcgtataaaggtaaatggcatcttacccgggagatcgatcagccggtcgctggtaaatcggtagaagaaatggacctgggcgagatcccgacgccgcgactgcatgaaattatggaaaagtatggtttctctgattatcacggcattggcgatgtcatcgggaaaagtaagggaggctatttctttgattcagtcaccacggggcagaccattagttggctacgtaacaccggccgcccgctgaatgatgaaaataagccctggttcgcggcagtaaacctggttaacccccacgatgtcatgtttatcgacaccgatgagcatggtgagcaggtgcagtggaaagggccaatggataaagaaaaccacaccctgctgccaacccaacccccgcacaaccaaatctatcagcaaagctggccagactatccgctgcctgcaaaccgccatcagtcgctcgatgagcctggcagacctgccgcccataaagagtaccagaatgccagggcggtgatggagggacagttccccgatgaagaccggcgctggcgcaaattactggattattatttcaactgtattcgcgacaatgaccagcatcttgaggcgattctcaatgagctggataacctgcagctgacgcaaaatacgattatcgtctttaccgccgaccatggggaactcggtggctcccaccagatgcatggtaaaggttcctcggtgtacaaagagcagatccatgtgccgatgatcattcgccatccggcgtatccgggaaatatccgctgcaacagtttgaccaatcatctggatttagtaccgaccctgattggtctgactggacgcgatcgctcgctgcgagagaaagtcctggagggcagaaaaggccgggatatgagcccattactggcgcatcctgagcaagcgggcttaaatgcgctgcgtccgggttcgctttattgttacggcatgatcctgtatatggatgcgcaatacacggcaaaattcagaaagctggctggagaaaaactcccgcacgatcaatttaaaaaagcgatcgcgtcactccatcctgatttttcccatcgctcagggatccgtatgatcaacgatggacactataaatttgcccgctacttttcgctcaagcagcatcatattcctgctaccctggccgagctgctggagaataatgatgttgaacttttcgatctggttaacgaccccgaagaaaatcataacctcgcccgggagccagagaaataccgggatctgttaatgacaatgaacgataaactcaatcagctcactgccgctgagattggcgaagatgatggcagctatatgcccccgtttgaaggaagccagtgggatctgacggcggcccagatgcatcaatatatgcgcgattagcgcttgccgtcaggtgggagaccttaatgtagcagctataaaaaaaccctctgtaaacacagagggtttcgttttactcagctaacgccggggattactcccactcaatcgttgctggcggcttgccgctgatgtcatacaccacgcgggagataccgttcacttcattgatgatacggttggagacgcggccgaggaaatcgtacggcaggtgtgcccagtgcgcggtcatgaagtcgatggtttccaccgcacgcagggaaaccacccagtcgtatttacggccatcgcccatcacgccgacggaacgaaccggcaggaacacagtgaacgcctggctgactttgttatacaggtcagctttgtgcagctcttcgatgaagatagcgtccgcacgacgcagcaggtcgcagtactctttcttcacttcgcccagcacgcgcacgccaaggccggggcccgggaacgggtgacggtagagcatgtcgtacggcaggcccagttccaggccgatcttacgcacttcgtctttaaacagctcacgcagcggctcaaccaggcccatcttcatctctttcggcaggccgcccacgttgtggtgagatttgatgacgtgcgctttaccggtggcggaagcggcagactcgataacgtcagggtagatggtaccctgcgccagccatttgacgtcgtccagcttcagcgcttcttcgtcgaacacttccacgaaaacgcgaccgataattttacgcttcgcttccggatcgctttcacccgccagcgcgtcgaggaaacgctgctcgccttcaacgtgaacaatgttcagaccaaagtggtcgccgaacatctccatcacctgctgcgcttcgttcaggcgcagcagaccgttgtccacgaatacacaggtcaggtttttgccgatagcgcggtgcagcagcatcgcggtcaccgaagagtccacaccgccggagagaccgaggatcactttgtcgtcgccaacctgctgacggatacgctcaacggcgtcgtcaatgattttcgccggggtccacagcgcttcgcactggcagatgtcgcgcacgaagcgctccagcatacgcattccctgacgggtgtgggtcacttccgggtggaactgcacgccgtagaagcgtttttcttcgttggccataatggcgaacgggcagttgtcggtgctggcgacggtcacgaagtccgccgggatggcggtcactttgtcgccgtggctcatccacacgtccagcagcggtttgccgtctgcggtcagggaatcttcgataccgcgcaccagcgcgctgtcgttaaccacttcaacctgcgcgtaaccaaactcacgctcgttagaaccttctacatggccgcccagctgcatcgccatggtctgcatgccgtagcagacgccaaataccggcacgccggcttcgaacacatactgcggcgcgcgcgggctgttctcttcggtggtgctttccgggccgccggaaagaatgatgccgcttggattaaattcgcggatctgtgcttccgtgacatcccatgcccacagctcacagtagacgcccagctcacgcacgcgacgcgccaccagctgagtatactgagacccgaagtcgaggatgaggatgcgatgtttatgaatgttttccgtcattgacgctaattccgaggcaagtgaaacagagtaaataaatcgcccgacgcaaggtcgggcgaagaaatcaggagcccagacggtagttcggggactctttggtgatggtcacgtcgtgaacgtggctttcctgaatgcccgcaccgctgatgcgtacgaattcagctttggtacgcagcaggtcaatggtaccacagccggtcagacccatacaggaacgcagaccgcccatctgctggtgaatgatctctttcaggcggcctttataggccacgcgaccttcgataccttccggcaccagtttgtcagcggcgttatcgctctggaagtagcggtcagaggagcctttagacatcgcgccaagagagcccatgccgcggtaagatttgtaagaacggccctgatagagttcgatttcacccggggactcttcggtacccgccagcatggagccaaccatcaccgccgccgcaccggcggcgatcgctttggcgatatcgccggagaaacggataccgccgtcagcgataaccggaataccggtcccttccagcgcttccaccgcgtcggaaacagcggtgatctgcggcacacccacgccggtgacgatacgggtagtacagatggagcccgggccgatgcccactttcaccgcgctgcagccggcttccgccagcgcgcgtgcgcctgcgccagtggcgacgttgccgccgatgatctgcaggtcaggatatttcgcgcgcgtttcacggatacgctgcagaacgccttctgagtgaccgtgcgaggagtcgatcagcagaacgtcaacgcctgccgctaccaacgcgtctacgcgctcttcgttgccggcaccggcgccgaccgccgcgcctacgcgcagacggccctgctcatctttacaggcgttcggtttacgttctgctttctggaagtctttgacggtgatcatgccgcgcaggtggaagctctcatccacgaccagcgctttctcaacgcgtttttcgtgcatcttagcgaagaccacttcacggctttcgccttcacgaacggtgaccagacgctctttcggcgtcatgtagacgctgaccggctggttcagatcggtgacgaaacgcacgtcgcggccggtgatgatgccgaccagctcgttttcttcggtaaccaccgggtagccggcgaaaccgttgcgctcggtcagctctttcacttcacgcagagtggtcgtcggcagaacagtctgcgggtcggtgaccacgccggactcatgtttcttcacgcgacgaacttcttccgcctggcgctcgatggacatgtttttgtgaataaagccgatgccgccttcctgtgccagggcaatagccagacgcgcttccgttacggtatccatggctgcggagagcataggaatattcagacgaatggttttcgtcagctgagtgctgagatcggcagtattcggcagaacggtagaatgagcgggaacgaggaggacgtcgtcaaacgtcagggcttctttagcgatacgtagcatgggcaatatctcgaccagggtggataaatattgccgtggcattatacagagcgtaaccgattgcatctacccttttttgcaaataatacttgccatcccctctgagcgcgttactatcgactgaataacctgctgatttaaagtttgatcttgctcacatgttaccctctcaatcccccgcaatttttaccgtaagccgcctcaatcagacggtgcgtctgctgcttgagcgcgaaatgggccaggtttggatcagcggcgagatctctaacttcagccagccttcttccggccactggtacttcaccttaaaagacgataacgcccaggtgcgctgcgcgatgttccgcaacagcaaccgccgggtgacgtttcgcccacagcacgggcagcaggtgctggttcgcgccaacatcaccctgtatgagccgcgcggcgactaccagattatcgtcgaaagcatgcagcccgccggcgaagggttattacagcagaagtatgagcagctcaaagcgcagttaacggcggaaggactgttcgagcaaaaacataagcaggcgctcccctcccccgcccactgcgtcggcgtcatcacctcgaaaaccggtgcggcgctgcacgatattctccatgttctcaggcgccgcgatcccgggctgccggtgatcatctacccaacctcggtccagggtgacgacgcccccgggcagattgtgcgcgccatcgcgctggccaacgcgcgccaggagtgtgacgtactgattgtcggacgcggcggcggttcgctggaggatctgtggagttttaacgatgagcgggtggcgcgggctattttcgccagccagatccctatcgtcagcgccgtcggccatgaaaccgacgtcacgatcgctgattttgttgccgacctgcgggcaccgactccctcagccgccgcggaaatcgtcagccgcaaccagcaggagctgctgcgccagctgcagtccggacagcagcggctggagatggcgatggactatttcctcgccagtcgccagcgccgttttacccagctgttccatcgcctgcagcaacagcatccacagctgcgcttggcccgccagcagaccgccctggaacgcctgcgccagcggatgcgtatcgccgtggagtcacagcttaagcgcgcagaacagcggcaaaagcgcaccgttcagcgtctgaatcactacaacccgcagccacggatccaccgcgcgcagtcgcggatccagcagctggaataccggctggcggaaattatgcgtggccgcctcagcgagcggcgtgaacggtttggcaacgcggtgacccatctggaggcggtgagccccttagccaccctggcgcggggctacagcgtcacctcggtgagcgacggtacggtgctgaagcagacaaaacaggtcaaaaccggcgatctgctcaccacccgcctgaaagacggctgggtcgaaagcgaagtgaagcagatcgcgccggtgaaaaaaacgcgggccagaaagccttcgcccactaaaccagcggaataaattccacccgttttttcgagataaggccatgcccatgctggcaaaagtaatccaccgcgccgcacgccttcagcacctccagcggctggtggcattccgggcagcgggcctcaagggtaaataccctttcgcactgggcgcaatgcgcgctactgcctttgacatctaacggcgcgtggcacagagggcaatcaagttccataaccattcctttcaacgtttatctgcacctattttatcatgttccgggtttaatgcgggccgcgtaattgctgctgcaacctgagcagccattccacttcctcaagcctacgctgcgttagcccggccacgctgtccggcgcccggataaacaaattatccgcgccgaggatctgctcatcaagacagtgcgtatagatcgccccgggccgggtccagcgctgcacccgctcgccgtcctgtagcgtcaccacttcgccctcaggggcgcgatcgagggtgattactcgcccgtcccgcagtcctattcgcattcccttttgcccgcccgcgggacccgcgtatttgttgagccagatattgagcgggatagtgcccagggttccctgcagatgcgccaccccctcggcagtgctggtatccccaggagcaatgtcatggccgaggcggtctttcgccacccgaagggaaaggctcagcgccgtatcgcttccgctggcgtgcagggtttcgcggagcatcgccaggacatgggtgccgatatcgaggatcaccccatcagggtgacgcagctgccgggtatccagctccccggtggcaaaattgagtgcgaccggctcaccagcgctgttaaagccgcttggctcctgcaaagagccttcgagccagacgatatcctgcgctgacaggtgcggcggcggcaggcggctggcctccccttccgctcgccaccgcgggtcaggagcgttcagcgcaacgcctcgcgccatccagtggtcaagagccagcacccgcgcggcctgctcaggcggcgccagcagcgcccgcagtcgggcggcctgctcaaggttggccacgatcggcttttccaccacgatgcgggaaatgccgctggctaacgccctctccagtacgggcagatgctgaagtgatgaggtggtaatgaagagcgtatccaggggttcggccagcagcgccgacagcgaactacagcgctggatccccggcagcgctctgctgcagtccaggtcatagccctggcagcggtcgatgacgtcccccaggcgacgcagcgccggtaaataggcggtttccaccaccgcgccgaggccgataaaaccaatctgcatagtaagtccacctttgagccgctctgttcccggcgaagtatcgcgggattatggcggaaggttttgacatttaccggcatggcggccacaaaaacccaccaatatgaatttcaactttgaattgatgtataaaattgtacctactacgagatacctggcattttttgcgtgagaataatggagtcatgcacaacaacggtcattccatgagtcgcggtagtaaatatttccgtccatgtatttccaggtgatcgcctcataacgcatctcgagcgtttccaggtgggtactgctcataccagtaggtgataaatacggcgcaaccgtagtgactttgacgttctccaggatgatgttgaaatactcggcctcaatgcccgcctccagaatgcgatacatctttataatcgccttcttcatcgggcgcccctcacacacggcacgatacaaaagcggtgttgtctgatcgaattccttcactatcgacacaggacgatgtattcgcgtacctgtcagttttccccagcttggatcaactggaatagtaataccatgagagaatgattttaactcaatagatccaagacgcgttggcatcatgcagcttccaatgatcggagaaccgttttcatcttcaagccataaatgtgcgggagtagacatacaatttccttatcataaataacgttagaattaccatttcacatagcgcccaaagataataatcataagtacagcgaatataccaacaggccaaaccggcccctcaggaaaaatttgaaaaaaaaccactgcaaatatgacaatgcaaagtggcggggcatacagcgaaattaattgctggaacaaccacaaaagcgctcttttaataaatgacatcatcactacctaatcattctttcgatgatattagcgagctctgcctctgaagcccattgggctttaaaagcgtcggcatgttcaaataatggcgccaccaggaaatacatcatttcaagttcttgttcgtatagtatagtaaagaatgcaggataacagattcggagacgctcagcgctatctgcagccctctgcacaacgccatacatgccagccactgtaacggcgccccccgcagaacgcccagcaatcgctcccatatcaaggcttagtttcatgcctaccgaaacacaggtagccgtagctaaaacaaatccagatttggttagagagtctgcagcgatatgaatgttaacagccatcagaattcttttaatatgctctaactgctctgggtaatgactccaacttattgatagtgttttatgttcagataatgcccgatgactttgtcatgcagctccaccgattttgagaacgacagcgacttccgtcccagccgtgccaggtgctgcctcagattcaggttatgccgctcaattcgctgcgtatatcgcttgctgattacgtgcagctttcccttcaggcgggattcatacagcggccagccatccgtcatccatatcaccacgtcaaagggtgacagcaggctcataagacgccccagcgtcgccatagtgcgttcaccgaatacgtgcgcaacaaccgtcttccggagcctgtcatacgcgtaaaacagccagcgctggcgcgatttagccccgacgtatccccactgttcgtccatttccgcgcagacgatgacgtcactgcccggctgtatgcgcgaggttaccgactgcggcctgagttttttaaatggcggaaaatcgtgttgaggccaacgcccataatgcgggcggttgcccggcatccaacgccattcatggccatatcaatgattttctggtgcgtaccgggttgagaagcggtgtaagtgaactgcagttgccatgttttacggcagtgagagcagagatagcgctgatgtccggcggtgcttttgccgttacgcaccaccccgtcagtagctgaacaggagggacagctgatagaaacagaagccactggagcacctcaaaaacaccatcatacactaaatcagtaagttggcagcatcaccactgctctgttgttttgtgcttaaatatttcttcaaaatatattttcagcatttcatatacaatattcttacgctgtaaaagatggtagatacctttagcaaatctaacatcctcattcttctgctttttacatacatcctgatactcatcagtaaaacaggatgtataatataggattcgagtaacgccagcacctattgttttaacctgaccggaaacccgttgttctatgcctgaaacagcgcgatcaagtttcattgcgagaattttattggcctgtaaatagctgatgacaacattgctgtaatacataatcgctccttgccgattaatttccccatcctgggaagaaccgcaatttaccacaatactcagccataaagtagactctccagtttctcccatattacagaagagcgacaccgtggattttctccgatatatccagatgcgttttctctcgtatcattgcgataactttctgcgtatatattatcatagcgtactcaaacaattgcttgagcaagcgaagctggcaaatgagaaatctcataggatacgtgcagatatacatgccaatcatgcgcgttgttgcgtcgctacaatcggccttaataaaaaagcccggcagagcgggctttgaaggattcatgttggtgggtaaatcttgctgatagcttatttgcttttcttgatgtgcttgatcaagcgcttacgtttacgcatctggttcggcgtcagggtgttacgcttgttagcgaacgggttttccccttccttgaactggatacggatcggcgtgcccatcacgtccagggatttacggaagtagttcatcagatagcgcttgtaggaatccggcagatccttgacctggttaccgtggatcaccacgataggcgggttgtagcccccggcgtgggcgtatttcagcttcacgcgacggccacgcaccagcggtggctgatgatcttccgccgccatgttcatgatccgggtcagcatcgcggtgcttacgcggcgcgtagcgctgtcgtaggcttcgcgtaccgattcaaacaggttgccgacgccgctgccgtgcagggcggagatgaagtgcacccgggcaaagtcgataaagcccagacgatagtcgagggtctccttcacctgctccttcacttcctgactgaggccatcccacttgttaacgacgatcaccagcgaacggccgctgttgaggataaagcccagcagcgagaggtcctggtcggagatcccttcgcgagcatcgatcaccagcagcacgacgttggcgtcttcaatcgcctgcagcgttttgatcaccgagaacttttccactacgtcggtgattttcccgcgcttgcgcaccccagcggtatcgatgagcacgtattcgcgctcgtcacgctgcatcgggatataaatgctgtcacgggtggtgcccggcatatcgtagaccaccacgcgatcttcaccgaggatgcgattggtgagggttgatttaccgacattaggacgcccgacaatcgccagcttgatcggcagatcctgcggattgaagtcgtcttccggctcttcttccgcttcgccattctgctcggcttcgaatttcgcccaatattcggcgtcttcatccacttcttcctgcggattaacctcatcgacccatggcagcagggcctgctccagcaggctggtcacgccgcggccgtgcgaagcggcaatcggatagatatcgcccagaccgagcgaccagaagtccgccattgcctggtcgacgtcgatgccgtcggttttgttagccaccaggaaggtgggcttttcacgagagcgcaggtgtttagcgatcgcgatgtccgccggcatcaggcccgcgcgcgcatcgaccataaacagcaccacatcggcctcttcgattgccagcagcgactgctccgccatccgggtttccacgccctcttccgtaccatcaataccaccggtatcgatacagatgaattcgcggccttcgacttcggcccgaccgtacttacggtcacgagtcagccccgggaaatccgcaaccagcgcatcacgagtgcgcgtcaggcggttaaagagcgtggattttccaacgttagggcgcccgacaagcgcgaccacaggtatcatgttaaatgcctcatacaatcactaagcaacatcgtcttaacgacgtttttaaaaaagtcaaaacggcccctgtctgccaggggccgtttcttaatcactcacgacagcggtaattaacgcgtaatcgcgtacagcgtaccgtctttcgcctggatcagcagtcgaccatcggcaaccaccgggtcggtcaggaagccggaactatcgactttctgctgcgccacaaaatggccatcttccggattaacccagtgcatgtagccttcgctatcgccgacgaccagattgccattatacaacaccggcgcggtcagcaaacggtgcagcagatcgctttgcgtccacagggttacaccgccgtcggtggtcagtgccagcaggcgatcgttctggtcaaccaggtagatacggttaccatcgacgatgaaatcattcaccgaacccagctcgcgtttccacataatctggccgctacgcaggtccagcgcggtcaggttaccgttataagccagcgcataaaccacaccgttaacgatgatcggcgtcgtgtcgacgtcgttcaggcggtcaatttccgtcgggccggtggccgtagaaatacgctgctgccaaatcatctgcccctgctgcatcaatactgcactgacgcggccgttgtcgccgccgacgatcgccgcgccgtaggcgatcgcaggcgcagactcgccgcgcagggagagcgccggcatatcgaggttaacggtccacttcacggccccatcggtctcgtttagcgcctgcagctggccgttactggtatgcaccagcaccatgccatcgctcaccaccggacgcgacagcgcctcgccggcgacacgggtttgccaggccacgctaccatcgctggtattcagcgcatacagctgcgctttctcgctgccgatataaacatggccgccagagacggtcaccccgccagaaagcagcgctggcgtgcgcgagaaccagccatctttctccgccagattcaccgaccacacctctttgccgtcgtcggcgttcagcgctttgacggtgcctttacggtcagcagcatacactacgccgtcggcaaaggccggatgaaggttagagtaaaattcgccgataccatcgccaaccgaggtgctccaggaagtggacggcgtaaactggttttctaccgtcggcagcggtgacattttcaccacatcttcttcgctattaaacagcgaacacccgctcagcaaggtaacggaaagcagccctggcaacagtaatttacgcaattgcatcgagtccctctcagatggacaaattattcattttcatacgcatcatttcgctgagcgcaggagaagcatcgcttttcacgccagcttcccacgccgcacgggccccttgcttatcgcctttgctcaacagaatttcgccgcgcaaatcggccacaatggcggtccagccctcacctttgatgctgtcgagggttttcagcgccgcatcagcctgtttcatttgcagctgaacgcgggccagacgcatactgataaccgatttcagattatcatcagatgcggccgccagcccctgctgcagctgcttttcagcgttcggcagatcgttctgttcaacaaaatgctgtgccagctcgagagaggcgaaggcgccgtaggtatttttattgtcagccgcgaatttctctgcccctgacagcacttctggcgtattcgatttcagcgcggaagtcgccttctcgtaagccagcgacgcgtctctggcggtatcctgctgatgggaggtccagtagcgccagccaaccagcgcgccaatccctaaaatcaccccgaccgccagcgctttgccgttttcggcaaagaaacgcttcagcgcatcgacctgatcgttctcgttgttaaaagtttccacgcagtccttctcctgactaataattcccgggagattaacccagaagtgtgcgcaaatgcgcggcaacgctctcctgcgttacggtagtttgctcacctgagcgtaaatccttcactaccacgtttccgtcagcaatctctgattcaccgaccaccagcgcgacgcgcgccccccacttgtcagcgcgggcgaactgcttcttaaagttgccgccgccgtggttggtcatcagcttcacgccgggcagcgcatcgcgaacctgctcagccagacgcattgcagcagactgagtatcggtcccggaggctaccaggtatatatcgacaacaggatcggctttaaattccggattcactgcctggaccagtaaaacaagacgttccagacccatggcaaaacccacgcccggggtagcgcgaccgcccagctgctcaaccaggccgtcgtaacgaccgccggcgcagacggtgccctgggaaccaaggctggtggtcacccactcgaacacggtgcggttatagtaatcaaggccgcgcaccaggcgctggttgacggtgtagcggatcccggcatcgtcaagcagcgcgcacaggccggcaaagtgggctttcgactcttcgtcaagataatcgccgagcgccggcgcgtcgttgagcagcgcctgcacgtccgggtttttggaatccagcacccgcagcgggttggtatacatccggcgtttactgtcttcatccagtttatcggtaaactgctccaggtatgccaccagcgcgtcgcggtagttggcgcgcgcttccagcgaaccgatggagttcagctccaggctgacgtgctcggagatgcccagctcacgccaccagcgcgcggtcagcataatcagctccgcgtcgatgtccgggccctgcaggccaaacacttcggcgccgatctgatggaactggcggtagcgacctttctgcgggcgctcgtgacggaacattggcccgacgtaccacagacgctgttcttgattgtacagcagaccatgttcgatgccggcacgtacgcagcccgccgtcccttccggacgcagcgtcaggctgtcgccattgcggtcttcgaaggtatacatctctttttcaaccacgtcggtcacttcgccgatcgcgcgtttgaataacggggtctgctctacaatcggcaaacggatttcgctgtaaccgtagctaccgagcacctgcttcagtgagccttcaatgcgctgccagagagcggtttcgcccggcagataatcgttcatgccacggatggcttgaatgttctttgccacgtttattctctttatatatacaaaaatgaaccccggcgcctcgcgcccgcaggttcaatcatacacgggaagcgtatcgcttcccaacacgttattttgcttcaacctgttgaacgtcaatccgacgggcttcatcgagcatcgaggctttggcgcggatccgcgcttccagctggtcgatcatgtcgttgttgtccaggcgatctttacgcacgccgtcttcatacaggccgcttttcttgttgccgccggtgacgccaagggtggagaccagcgcttcgcccgggccgttcaccacgcaaccaatgatcgaaacatccatcggggtgatgatatcttccagacgctgctccagagcattcaccgtaccgataacgtcaaactcctggcgtgaacaggtcgggcaggcgataaagttaatgccgcgggaacgaatacgcagagatttgaggatatcgaagccgaccttgatctcttccaccggatccgccgccagcgagacgcgcagcgtatcgccgatcccctcggacagcagtagtcccagaccgatcgccgattttaccgcgccgctgcgcgcgccgcccgcttcggtgatcccgagatgcagcggctgatcgatctgtttcgccagcagacgataggattccaccgccaggaagacatcggaggctttaacgctgactttaaactgatcgaagttcagacgatcgagatgatcgacatgacgcatggcggattcgagcagcgcctgcggcgtcggctcgccatatttttcctgcagatctttttccagcgagccggcgttgacgccgatgcggatcgggatgtttttatcgcgagcgcaatctacaaccatgcggatgcgctcttcgttgccgatgttgcccgggttgatacgcaggcagtcgacgccatattccgccactttcagcgcaatacggtagtcaaagtggatatcggcgaccagcgggacgttaacctgctgtttgataagtttgaacgcctcagcagcgtccatcgtcggaacagagacacggacaatgtccgcgcctacgcgctctaacgctttgatttgatttacggtcgccgccacatcggtggtgcgcgtattggtcattgactgaacggcgatgggagccccatcgccaattggcacattaccaacgtaaatacgtttagattttctacgttgaatcggagcctggttatgcatgaaaaatctcccgcgttacccgtctgttactgcgccggtgatgattcggcattgagggtcagacgcgcaacctggttagttctgataaaacgacttaaatcgacaggcttgcccagatactggatctgtaccgcggccggggcgccaattttcagcttatacggcgcctgaccgctcaggttcaggttaccgcctttacgctgcaggccgctgaacagttttttaccggtggcatcgctcacttccagccagcagtcggcggaaaagttcatcaccagatcctgcgccgacgccgccggagtcgtgacgttcgcctgatcggtcggcaacggcgaggctggggtggtagccggagctgccggcgtcgtccccgcggtatcgacattggcctgggaaggcgccacgacagcgttattatctgctggcgtctgggccggcgcgctggtggtcggtgcgctggcggtatcggttggcgcgctgttcgcggcgctatcggcggtcggggctgcaggggcgctggtatccagcggcacgttctggctgttggcgtcgccgccgttcagctctgcggaagactgatcggccatagtcgaaatctcttcctgctgcgccttatggtcttgccaccaccaggcgccgctcagaccgataaccacaaacagcaccagccaggtgaagctcatcagccagccgtcgcgctttttgcggcgcttgcctaaagagaaactctgcattggcgcgactttcgccgcgcggatgggcgcctgcttggccatcatcggcagcagctcgtcttctggaatatgtacgaggcgagcgtaggagcggatgtacccgcgcaggaaggtggaggcgaggtcggcgggggccttatcgtcttcaatatcacgaaccgtggacaccttcaggcataagcgttcggccaccgcttgctggctaagtccgagttgttcgcgggcgtgacgcagacgcgcgcccgtggtgtttgcttcttgatgatcttgagtggcttcagtattcattcgctacaactactggtacgtgaaatttaaagttcagcgcgggaaaaagccggcgccgcgagacatctgtgctacgtcagccccacagtataggactgtcagccgcgcgatcacagagacgaatcaaaattgaatgctaagcggttgttgtgccgctacatactgcctcaaagtcgacaaaaacgcaccgtaattattaaccgaatcagcgtatttcgcctggctatcggccataaatatgacccgtgccgcctgcgctgcacgggtcatcatttgtcagaccgcttttacgtcaatcgcttcgccctgcatccgcttacgcagcgtacgcttggtacggtcaatgacgtcgcccgccagctggccgcaggcggcatcgatatcgtcgccacgcgttttacgcacgatggtcgtaaagccgtactccatcaggactttggagaaacggtcgatgcggctgttggagctgcggccatacggcgcgcccgggaacgggttccatgggatcaggttgatcttgcacggcgtatctttcagcagcgccgccagctcatgggcgtgctcggtgccgtcgttgacgtgatccagcatcacgtactcgatggtcacccggccctggttggcgttggacttcgaaatatagccgcgcaccgagttgaggaacgtctcgatgttgtactttttgttgatcgggacgatttcgtcgcgaatggtgtcgttcggcgcgtgcaaggagatcgccagcgcaacgtcgatcatatcgccgagtttatccagcgccggcaccacgccggaggtagacaaggttacacgacgcttggaaaggccaaagccgaaatcgtcgagcatgatttccatcgccggaacgacattgttgaggttcagcagcggctcgcccatgcccatcattactacgttggtaatgggacgcacgccggtggtcttcaccgcgccgacgatcttcgccgcgcgccagacctggccgataatttcggatacccgcaggttgcggttaaagccctgctgggcggtggagcagaatttgcactccagcgcgcagcctacctgggaggagacgcacagggtggcgcggtcttcttccgggatatagacggtctcgacgcgctgatcgccaacggcaatcgcccatttaatggtcccgtcggttgagcgttgctcttcaaccacctccggggcgcggatctccgccacttctttcagtttactgcgcaggactttgttgatgtcggtcatctcatcaaagtcgtcgcagcagtagtgatacatccatttcatcacctgatcggcgcggaaaggcttctcgcccatgtttttgaaaaactcgcgcatctgctgacggtttaaatccagcaggttgattttggcatctttgttcggcaccgtcagagcggcggtatcaggcgtgacaatttgttcagacataatattttccggcctcgttattacacgttatggccccaggtgggttgaaaaagaaacgccccggagagcgactgctcgtccaggggcgctatattctacaaattctggcgcatggaagccatgcctgcgcgcagtcaatgatgaaaaaatctgttactgactgctcaatcctctaaggcttttcgattgtcaggccaacgccgcgacgatcgaaaagacgaggtttatatctccaaagtatttcaggtcaccgcgaggcggcgaattcgcacatccccgggagcatagataactatgtgaccggggtgcgcgaatgaagccaacaaagcggtggcgtgaaagacgcaggagattagcgagtgcgcgggcaaacctcgccttcagcaaagaagaacgcgatttcgcgggcagcggattctacagagtcggaaccgtgggtgccgttctcggtgaagctgtcagcgtagtcagcgcgcagggtacccgccagggcgtttgccggattggtggcgcccagcaggtcacggtgacgctgtaccgcattttcgccttccagaacggaaaccacgatcgggccggaggtcatgaactcaaccagaccgtcgaagaacgggcgaccttcgtgctcagcatagaaaccacgagcctgttcaacggtcaggtgcagcattttggtgccgacgattttgaaccctgcagcttcaaagcgggaaaagatgctgccaataacgttttttgccaccgcgtttggtttgatgatggaaaaagtacgttcaatagccatgattacctctaattaaatgttctgttgttgcacatacgattgtatggcctggcgcgcattataatgagcatccccgcccctgcctacggatgaaggtaacattttgttaaaataagatgagtattgaaaacacaaaccgccaacaacaaattcaccctggttattgcagggtgaagctggcggccgccgtctgacccgcttcatccatcaccaccaactgccactcgccgggtttatccagcattagcgtggttcttgcgccggcggcctctaacggttcgccattaataaaccaccagcgccgcccctccccaccgctggtttgtagcggcaacatcacccgcgcctcacccgggagacgttttatcaccgccccatcacggatgccggacagcaccagcggcgcggtatcctgagtctgtaacggcgggcatgactgcgatgccggtcccaggcgcgcgcgccgcctttcgctggccggcagccagggatccagcggcagcggccagacttcgacctggctttcccgagcgccgggacaatccgccgccacccgttcgccgtgttcattgcgccacaccgggaagcggatcccgcgtacgctctcctgccccggcagcagcagagtcggcggctggctggcatccaaaagccagctggccaggcgacgacgacagttgctgtcgcccgccggcagatcctgcccgccaggccagcagattgtcccctggctgaccgttgccgggcgcggatcgctcggcagcccgccgcggctcatcgccgggcgggccagcagcagattattgacctggttgagcagcggtacggcgctggcgaagccaaactggcccaccaccggcgtaccgtccgggcgcccggtccagatgcctatcagatatcgcgcattgaggccgaccgcccacgcgtcgcgatagccgtagctggtgccggttttccacgccagcggcaccgcctgcggcagcgaggcatcgggaaccggttgcgcttcgccggccaaaatacgccggacgatccatgccgccccgggcgacatcagcgcgcgctcggtcaatggatcgctcggcttcaggcgcagccgcgccgccttgccatggcgggcgaaggcgctgtacgccgcgacaatatcttccagccgcgccccggcgccgccgaggattagcgacagattcggctctgcgccagcgggcagcgtcaggggcagcccggcgttgcgtaaattagccgcaaagcgttttggtccataggcttcgagcacctgcaccgccggcagattcagcgaccgcaccagcgcctcgctggcgctcaccgggccatgaaacccgctgtcgaaattaccggggcgataatcgctaaaacgccgtggcacatcctgtaatagcgatgccgggtgaatcagcccctcatccatcgccatcgcgtagataaagggtttcagcaccgaccccggcgagcgtaccgccgagaccatatcaatatggccgaagcggctgtcgtcggtgatatccgccgagcctacccagccgcgaactttcatatccgtgtggtcgacgacgaccatcgccagcgaactgcgcggcggcaggcgcgatttccagttcagcgccagatcttccagttgccgctgcagtccggcatccaaagtcgtcaccaccttttcatcacgactggtcgccagcgcccggcgtgaaaaaagcggcgccagctgcggcatctggcgcggaaacagccatactggctcctccatcgcttcctttaccgcctgctccggccagacgccctggctgagcattcgcgtaagcactttatcacgcgccgcctgggcccgctgcggccagcggtccggacgtaaacgactgggcgcctggggaagtaccgccagcagcgccgcctcgccgtagctaagccgggcaggcggcttaccgagataggcccagctggccgcgccgatcccctgcagggtgccgccaaacggcgcgcggttcaaatagagggttagaatgtcgctttttgacagatgccactccagctgcagcgctcgccacagctggcgcagcttgccgccgaaggtgcgtggatggggatcaagcaggcgtgccacctgcatggtaagcgtgctgccgcccgagataactcgcccggaagtaagatcctgccaggcggcgcgcagcaccgcgaagggattgacccccggatggcgccagaaccagcggtcttcatactggatgagcgcctgcagatagcgcggcgacacgtcggcgagcgtgaccggataacgccagacgccctgcgcgtcggcaaaccgccacagcggcgtcccgtcttccgccaccaccacacgggcaggcgtgacgtcatgcagcggcagcggccacaggcgatcggccgccagcaccgccagccacagcagaaaaataaacgccgccagccagcgccagcggcgttttacccgaggcaatacgcgcatttacggcgtcacggtgagcggaccgctggccgctcctgtcgcccgccactgcggcgcatacatcgattccacctgcggctgcgggacctgataagtgcccggcgtcaccgcccgcgccagatagaccagcgtcaccggctggccttcattgacagcgacggcggcgacaaagcggtcatcgcggaactcgatatgctgaatatccgcctgctgcatctggttaagcaggttttgcaccgcgtcgccattctcctgcaggctggcgctgctgttggccagattctggttttccagctccagaccggctggcaacagatcaaccaccagcgcgtcaggcacgttgcgtttggcggtcacctccagcttgacgagcaccagttcgccgctgcgcagtgaagacagcgatttctgctgcccctgggtatcgaaaatagtgcgttcaatccccaggacgttaccgcccggctgcggcgcgctttgcggatagccgctgctgtcgagacgcagccacagcggctgactgccggtattactcacctgcagcgccgccagccgatcgccgtcgaggttgcgggtttgcgctttgtcgccggccaacggctccgcctgcagcgaggttttcgcctgccagctgcccggcaggtccgccagcgtacgtccggcaaggaacaaggcgttggtttcctgggtcgacagccagcgctggccataggcctcttccgacagcgtgctcaacagctgattttgcacctccggcagcagtttattctcttccagcagcgccagcttcagggcgttatcgcgcagcgggctaccgtaatcgcccagccaacgattctcatcctggcgcggggtggcaaccgccagcttcagggcggcgtcgccgcgcggcgcatcgcccatggttttcagcgcaatgccgagctgcagcagcggcaagccggatcgcgcctggtcgtgacggctccagatttcacgcaaggcgccgagcggcgctttttgctgacgcgccagcaccagcgcggcgtatgcctgagcggcaaagcggctagcctgggcgtcgtcgctgtagcgcacggtcatcaggcctggctcctgcagatagcgcagtaggcgctcgttgcctttattaatggcgttgaccggtacgctatagccctgctcgctggcgcgcacgaggaagtccatggcgtaggcggtcagccagtactcttccggcccctctctatcccatagcgcaaagccgccgttttccagctgcatctgcagcaggcgtgaaataccgacatcgatggccgcgcggcgtttttcgtcgctgtccccgctaatgcccagcgcctttagctgcgccgcgctggtatacagggacgggaacaggccgctggcggtctgctcaaggcagccgtaaggataggctttcagctcgcggatatagcgggcgagattcaacggtggtttaccgctgagcagcagttggccctgcagcgtttgcggggcaaagccctggctctgcgccgccggcggctgccagctttcacctggctgcagcactgcgccgctgttgacggtctgtgccgggtacgccggacgcacgccgattttccactgtttttgcagcggggcgaaggtttcgcccggcaggctcaggccgctgatggtggcattaacctgaccatcgccgaagcccgccagcgcgctcactggtataaacagcgtgctgcgcgcccccggcgccagttgcaccggcggcagttgaccctcggtcaaggtcaccagcccgctggcggtaagatgaacctgcagggtttgcggtttatcggtcagattgctgagatccagcgccagccgtgtggtatcgccgctggcgaggaagcgcggggtgttcagttcggcgatgaccggggcggccaccaccactttatcttcgctgctgccgaagtcatccgccgtccacgcctgggccatcacccgcagctcgccgttaaaatcgccaatgggtaacgtcaccgtgccttcgccctgatcgttcaataccaccggctgcgcctgctgggcgacgatcgtcacgtggttgaccggcggtttgccgccgcgttttaactcgtcgccatcgccgccgaagcgcaggctggccacccgcccctgcccttcgatcacctggccgtagatgtcatagatatctgcgccgtaacgcttctggccaaagaaggcgttccacggatccggggtagcgtaatcggtgatattcagtaccccgctatccaccgccgagagcaggacattgacctgtttcggcgcctcgccctctttgacgctggctttcactttcaccgtcagcggctggttggggcgcattttgtccggggcctccagcgccagcgtcaggcgacggttttcatcgcccagcggcagatgcagcaggcccaccgcgcgtttcggcgttgccgagcgcgatttatcgccgggacgaaccaccagcgtgctgaggtagaggtcgtggcgattccaggttttatccaccgggatcgacaggtccatcccctccgccgggacgtcaatttcctgccaccacagcggcccttcgctggattccaccattgcgtagcctttacccgccgccggggcggcgatgtgcagcctgatggtgtcgcccggtttatagctcggtttatccagcttcatggtgacccggtcaggacgcgccgcgccggcgccttcgctgttatcctgccagctgtagcccgcccagaagcgcacgctgctgaccacgtcgtccggtcctttcacctccaggcgataggatccccactccaccgggaagctcactttgccgatctggccggcctgcaggtccagcgactcctcgccctcctgcagatctttttgatcgaactgcgactgccaaccttcgctgtcggaccagttccagtagtagtcgcgccgctcgcggatcagccgcacctggagaccggagatcgcttttttctcgcctttgacgtcggcatagacgatatcaaacgcggcgttactgttttcatccaccaccggctgtttgacggtggtatcggtgcggtaatcgtaaacgtccttcagcgtaaattgcgggcggatccccggcagcgcctcggcgggccagatcggctgcttaaccgtacgggtcaccgggcgaccgccggattccagcaggctggcctgcaacaccacctgcagcggcgaatggctatcctgccactggcttgaggtggtcacttcgccatggcctttttcgtccagcgtcagctggacttcatccagactacgggagaggttttcttccgcaatatcgccgaactggaagcccggcagcgcagcgacggcgtcgcgcagcgggcgcaggaacagcttgccctgcagctggttgccgctggccggcgcgccgtagagataagcgccgctaacgccaaaggtgacgtcggcatccggcgcgactggcgcggcctgcggcgtcaggttcagggccatgcgttccggcataaagtcttcaacgtggaaatcccattcgcgcggctgattgtcgccggcgctggcgcgaatgtgccacatgccggtagccgcgccgctgtcgagcggataagtaaactggtacaggccattcactggtttgctcatcaccgagcggatcacctggccgtccggctgaaccacctcgagtttcaccggctgctccgccagcggcttgccgtcgctatcgcgcaacagcgcattaaggatcaccgtttcgccgggacgatagagatcgcgcgggccaaacataaagaactgtttgctaaagccgggcgcgcctgcgatagagaattccgccagatccagcgccggcagcttgaggtcgagcagcgtggtctgcccctctttgcgcgccagcagcagcgcggcttctttatcggtttgcagggtgacgtggccctggctgtcgcttttcgcttccgccagggtctgccctttggcattgagcaactgcacctcaatgcccgactgggcggcgccgttttccagactctgggtaaaaacgtccagccggttatggtagcgatgcgccgagacgccgatatcgctgagggtaaacagcgtcgccgcgttgctgtagctataacggcccgccgggttcatgaccgccacgtagacgccaggctgctggagcggcttgatgtcgctcagcggcagcagcagcttttcgcgagtattacgcgccgggttgagatcgaagcggccgctgtagaccagatccgccatcttcagcagttcatcagattcccagttgcttaacgagttacggtattcccactgactgacaaaggcggagagcgattccggcttaatgcggaagaaattaacgtcgacattatcgacgttcagcgccatcaccggcagcccggcgaccacgttgcccggcagcagcgagccgcggctggcaaacccaacgctcggtgcgatatcgcgggtggtcagggtcttctcaaacggtttgtcgagcgtcgccttgttcagggcggtcagcgtcgggtcgaccgagacaatcagctcgcgctttggctcaaggtgacgcagacgcagctctttcagattcggcgccagctcccaggcaccgtccaccttaccgcttttcttgtcgaccagatgcacgctgcgggagaaatcctggtccggctgcagcgggacggaaaacgtcagcaccagggtcgcggcgccatccagttgcacctccgaggcgtcgaggagcgtcagcgctttaccctggcttttttccgccagcgccgccagctgggcgcggtccggttttgccgtcgcgcctgggttgctatccgcggctggcgccggggccgaggcctgcggtgtaccgctgtcatcacacccggttaatgaaaatgcggtaaggagcgctagtgatagcgccgctaaacgaaatggtttcatccttctaacccctcggccgatgagcctgatgcaatttgtcacatttattatgcgttatggcggcgcttctcaacagtgacgaagcgggtttctgccgattaatcagaaaagtgccgtgacgccgtccccactctggcgtccttaacttgtcagcgccagctaaaacgccgacaattcagtcatgaataataaaacggaggcacctatgtccacctcgttttttgtcgctgccgactggctggcagaacatattgatgacccggaaattcagattatcgacgcccgcatggcgcccgccgggcaggaggccctgcgggatatggccgcggaataccgcgccggccatgtgccgaacgcgctgtttttcgatattgaggcgctatccgaccacaccagtccgctgccgcatatgatgccgcgggccgaagcgtttgccgtcgccatgcgcgaactgggcgtctgcagcgataagcatctggtggtctatgacgaaggcaatctgttttccgccccgcgcgcgtggtggatgctgcgcacctttggcgtagagaaggtgtcaattctggccggcgggctggagggctggcggcgcgacgaactgccgctggaacaagggatgccggaagtggccgaaggggaattcgacgtgcggttcgatcctcaacaaattaagcgtctgaccgacgtcctgttggtcagccatgaaggatcggcgcagattgtcgatgcccgtccggcggcccggtttaacggccaggccgacgaaccgcgcccgggcctgcgccgcgggcatatccccggcgcgctgaacgtaccgtggacggatctggtgattaacggcgaactgaaaaccgttgacgagctgaacgacatctttttacgtcagggtgtcgattttgaacggccgatcatcgccagctgcggctcgggggtgacggcggcggtggtcgtgctggcgctcaccacgcttggcgtgaacggcgtctgcctgtatgacggctcctggagcgaatggggcgcgcggagcgatctgccgattgaaccggcccctgccgctccgtaaacacagcgtgaccgcgggcctcccgttccgcggtcactaaataatttctgattttctctcccactttcttctgcttctcgctaaaccggttactctgtgctgccgcagggtttgttcctgccgtattcgctttactgccactcactatataaggaaattgaataatggcattttcattaccggatctcatggatgtcgtacataagtacaaccgcaatcccactccgaaaccgattcccgtagacgaagtggatcgcctgcgggtacggaaatatcgtgacccgcaaaatagcgaaaccgtggcgcttccggagagtctgaaagcgctgttggcctacgattgccaactgaaaagcccccacggacagctggtactggaatgggttgtggactccattgatgaacatggcgtcctgctttccgactcgctggatgaagatgcttattacatgaatggtcttgatatggccggactggactttgaagagctgatgcccgtctggaacgacgatccgcgtcttcctgccctgattcgcatcagccacgccggcgatcagcaggtatttatctatgtcactgaacgtgatgaacagggtgaatatcctgttgtccgcttcgagggtaaagagaatgatctctggctggcagaatcgtcactgattgaatatctgcaggggatctttgccggcagcgaggagagtcacgacgaatggcagcatcagcagaccctcaatgaggcacgcgatggcgccttgctggagctggaatatattcatgaggatctttacgccaggctcgaaggctgtcctgactaattcaccatctcaccccggatgacgcgattaacgcgcgccgccggggcctgctccaggagggagcgttttatccgtaacctgatgtcaccacaaggagtgaaaatggcattagtctctaacccacattcggcttattcaccgcgccttccctggctgggaggtatagctggcctgctggcaggcggcgcgatcctttatttttggccgcaatggaaccggacatggctaagcctggtgcctgcgccagtctccgtgtatacccgctttctcggggtcactctcgaagacgttccgttagtcacctattgccatcaggcgctgctgggttttctgatggtgctgctcgcgcccggttacggtaagtcgacccttgccgcgtggatgatgcataacccagcgtcaagccggcgctggcccggcgaggtattccgtgcctgggtcacaaaatttggcctgctggtcatggtcttttgcaatctgttctttttgtcccgggtcccatccggaaccctggcgttatacatttttattctccagcacatcagcgttgccgcggcggtggcgtcaggggtgctgctcctgcgtgacgcccggcgcctggcccgcacgttcgacgctcagctggcggacctgcgtcttctcatgatacttaccctcgggttccagacgattttgccggcgcagatcgcgctgatgagcgcccggggcgtgaatacgccgctgggctggtacattgttatcgcgcaaatggcaggggtgttactggcgtttatgctggtcggcgggctggtggcagcgctacgttctctgctgggcgaagagaggtgccgggcctggcgcggggatatggcgctcttcaacggcattgtcacactgtgcgtgacgggatttctcctctatcacatggtgtctgcctatccgcgaatctttgccgccctgcattagcttttgccaccccgcttttgtgcctcgaactggaagcagaaagaaacagcgggggctgccgcccccgctgtcagataatgcggttctgcttaaaatcgcgcaggaagctgccccagcgcttttcatagaacggcgtgatatgggcaatcataaagtggctgatgcccttctcgccttccaccacctggcaaatatcgatcggttcgtcgcctggcaaggtatcggtggccacgctgccggtggtctggataatggcttcaatatccccttccgcttccgcttcaatcccgatcaataagtttgccggcgcgtcggcgcgctctttaatcgagcacagaaacgcccgcttgacggtcttcagcgttttgaacaacgtggtcagcgaatcgaccatctgcgccggcggttcggcgacttcagacagcagcagcgcttcgccgccttccagtaccgtctgggtgctcagtgggctgccctcttcgcctaacagatggctgatttcccgtggggtgaactctttgccgctcggcagcttcgggttgaggaataacgattcgcccagcgtcatcgccatcagcgtgcgggccggcatcatcacgaaagcctgttcatccgccaccgcctgctgcagcgcctccagcgaggtaaagaatgggatcaccgaggtaccgtcgtctttttcccaatgctgcagatccagcgcgctatcttcgacaatctgctcgccatcggctgccctgcccggcacccagacggtggcctccagcagcgcgctgaaaaatgccggacgatgggcaggctcagtcgccgctttttccagcagggtttctaattcattttttgtatctgacatagtttggctacttcacaatgaattgcccggcggccattcgtccacgcgggcatatggttttcctggccgggtaagcgcagcgccacccggcaaggccattactcagctgtcagcaggttagcaatggtacgcacgccaagcccggtggcgcccgccgaccactgctcaacggcagatttgcggtaggttgccgaacagtcgatatgcagccaaccctgatggtagttttccacgaagtgggacaggaagcccgccgcggtgctggcgccggccggataggccgcgctgccggtgttgttcaggtcagcaaagttggacggcagctggttgcggtggaactcggccagcggcagacgccagaaggcttcgttttccgcctgagcgctcgccagcaggcgattcgccagcgcatcgtcaaagctgaacagcgcgtggtaatcattgcccaacgcggttttcgccgcgccggtcagggtagcggcgtcgatgatcagctctggcttctgcgccgaggcgtcaatcaggccatccgccagcaccaggcggccttccgcgtcagtgttcataacttcaacggttttgccgttgcgataatgaataatatcgcccagtttgaaggcgttaccgctgatcaggttgtcggcgcagcacaggtagagcttcacgcgtttgttcagcccacgggtaatggcaaaagccagcgcgccggtgatagtcgccgcaccgcccatatcggatttcatcgaatccataaaggcgctttgcttgatgctgtagccgccggaatcaaaggtgatgcctttgcccaccaggcaggcgtataccggcgcctctttatcgccggtcgggttatagtccagcgccagcagaaccggcgggcgctcggagccgcggcccacggtatgcagaccaagatagccctgctcgcgcagatcttcgcctttggtgatgcgatagcttatcttctcacccgccacgccgcacagcaggtcgacagcgcgctgcgccagctgctccggacccagctcttccgccggcgcattgatggtgtcgcgcacccagtcgatgatcgtcaggcggttatccagctcgctgcgctgcgcgtcgtcaagggatggccattcgacctgacgctgacctttcggccctttatagccggcccaaaaggcccaggcgcgatcggtgttccagccttcgccgctcagggcgacgtgcttgatgcccatgccgtcaattttgcgcgccgcgcgctggataagcccgaggtcgtctttaccgttgagatgtagagcgatgccgtcgttattgatgctccaggtcgctttttctccccagcgtccatcggctggctgagtagaaagcgtaatcttcatagcttcggtcattatcattatccttcttagcaaacgggccaccctatggcagcccgttaaaatgttttcgcttaacgcgaaattattcggcctcgtctagccagactagcagaatcgcctcgagaattttttcattggatgcgtttggatcatcatcaaactcttccaaatcgcaaatccactgatgcatgtcggtaaagcgaacggttttcgggtcgagatccgggtaagcgtcgtacagcgcttcgccgatttcgcgactgtcggtccatttcagtgccatattagtgctcgcgtgcgtggttgatggtgtaacgcgggatctcaacgaccagatcttcgtcggtgacgcgcgcctggcagctcagacggctgtcaggttccagcccccaggctttatccagcatgtcgtcttcatcttcgctactttccgccagcgagtcaaaaccttcacgcacgatgcagtggcaggtggtgcaggcacaggatttttcgcaggcgtgttcaatttcgataccgctacgcagcgcggcatcgagaatggtttcaccggtctcagcttccacaacgatgccatccggacacaggtcctggtggggcagaaatacaatttttggcattttaaacctcgtccacggattggcctttcagcgcgatacggaccgactgatccatacggcgagcggcgaattcctgggtttgtgtgtcgatatttttaatcgcttctttaatcgcgtcagcgtcgtcgcctgccgcggcggcgcgtacctgctccgcagcggcatcgatggcctgacgctccgcggcgcttaacagcgcggcgtcggcggccagcgcgcttgtcaggctctccagcacgcgcgcggcttccactttctgttcagccagcatgcgcgcctgaatatcctgttcggcgtagctcatcgaatctttaatcatggtggcgatttcgccatcggtcagaccataagacggtttcacctggatggaggcttccacgccggtcgatttttccatcgccgtaacgctcagcaggccatcggcatccacctggaaggtaacgcgaatatgcgccccgcccgccggcagcgccgggataccgcgcagcgcaaagcgcgccagcgaacggcaatcctggaccagctcacgctcgccctgcatcacgtgaatggacatcgccgtctggccatctttgaaggtggtaaactcctgcgcgcgggccaccggaatggtggtattacgcgggatcactttctccaccaggccgcccatggtttccaggcctaacgacagcgggataacgtcgagcagcagcagttcgctgtccggcttgttgcccaccaggatatcggcctggatcgccgcgccgatggcgacaactttgtccgggtcaatggaggtcagcggagtgcgaccaaagaactcgccaacgcgctcacgcaccagcggcacgcgggtcgaaccgccgaccatcaccacttccagcacttcttgcgcttcaacgccagcgtcttttagcgcccgacggcaggccatcagggtacgttttaccagcggggcaatcagatcgttaaactggctgcgggtgatatcgccctgccagccgccgacctcgacgtgcgctgcctcggcatcgctcaaggcgattttcgccgcgatggcggcatccagcagctcacgctgcagacggttatcgctgcggtcgctgaagcccgcctgctcgcgcaggtagtcagccagcaggtgatcgaaatcatcgccgccgagagccgagtcgccgccggtggccagcacttcaaacaccccgcggcttaaacgcagaatggagatatcaaaggtgccgccgccgagatcgtagaccgcaatcaccccttcctggccggagtcgaggccgtaggcaatagccgccgcggtcggctcattgagcaggcgcagcacgtgcaggcccgccagacgcgccgcgtctttggttccctggcgctgagcgtcatcgaagtaagcgggaacggtaatgaccacgccgtcgagttcgccggccagcgcttcggtcgcccgggcggccagcgctttgaggatatcggcggagacgcgaatcgggttcagcaggccgccggccgtctggatcatcggcaggccgttttcactggcctgcagctgatacggcagatgcgggtaacggttttgaatatcggcgagggagcgccccatcatccgcttcacggagctgatggtattggcaggatcctgagcggcgttaagccgggcgtcatagccgacggtcagccccgaagcgtggtagttcaccaccgacggcagcagatagcggccttgatgatcgggcagagtctcggcctggccgctacgcacggtagccaccagagaattggtggtgcccaggtcgataccggccgccagacgacgctggtgcggcgcggcgctcaggccgggctcactaatttgtaataaggccataattgcttccgaaaattaaaaatcgagcagtttttcttcgagttcttcagcactgctgcgcagtttatcgaggaaacggagcttacgaaccgtgtccgccgccgcctcccagctctcattatgcaattggtcaaccatcagctgctgacgggtatcaaacagcgctttcacccgtttgataaaaccttccagccgcgcgtcgtctttcgcctggccgatctcatccagctcttcgcgcaattccagctgttccatcaggaacgcggtatcgcgaacggtatgctgctcgctggccagatcgaagccatgcagcgaaaggagatattctgcgcgagtcagcggatggcgcagcgtctgccaggcctggtttatagtggcggaatgctgaaccgccgcaagctgttccgccgcaggcgcgctggcaaatttatccggatggtactggcgctgcagatcctgataccggacagccagttgttcaagcgagagggtatagctggctggtaacccgaagagggtgaaatagtccatagtaacctcagggtcatgcatctaaattaaaaccccacgcgcggcgtgaccgcggtggggttgaggagtaccgattatacgttaaagctttcgccgcagccgcactcatctttgacgttagggttagtgaatttgaacccttcgttgaggccttctttgacgaagtccagctgagtgccgtcgaggaattgcagacttttgccgtcgatcacgaccttcacgcctttgtcttcaaacacggtgtcttcagccgccggctcgtcaacaaactccagtacataggccatacccgagcagccggaggttcttacgcccaggcgcaggccaaaccctttaccgcggttcgccaggaaggcattgactcgcgctgctgcactgtcgctaagagtaatcgacataacaaaacctcaactaattattttgcttcacgtttgcttttgtaatccgcaatcgcggctttaatcgcgtcttccgccaggatcgagcagtggattttcaccggcggcagttccagttcatcggcgatatcggtgttcttgatcgcctgcgcttcgtccagcgatttgcccttcacccactcggtaaccagggagctggaagcgatagcggaaccgcagccgtaggtcttgaagcgcgcgtcttcaatgataccttcattgttgactttaatctgcagcttcatcacgtcgccgcaggccggcgcgccgaccatgccgctgccgacgttctcgtcgctgttgtcaaaagagccgacgttgcgcggattctcgtaatgatcgataactttttcgctgtaagccatgatgaattctccttattggtgccgaattagtgatgtgaccattcaatgctgttcagatccacgccctgtttgaacatttcccacagcggagaaagctcgcgcagacggccaatggatttgcgaatcagatcgatggcatagtcaatctcttcttcggtagtgaaacgacctaaagagaaacgaatagaactgtgcgccagttcatcagtcatgcctaacgcgcgcagcacgtaggatggctcaaggctcgcggaagtacaggctgaaccggaggaaaccgccaggtctttcagcgccataatcagcgactcgccttcaacatagttgaagctgacgttaagaatgttcggcgcgccctgctcgaggtcgccgttgaggtacacttcttccatatccttcacgccgttccacagacggttgcgcagcgtgcgcagacgcgccatctcgctttccatctcttctttggcgatacggtaagcttcacccatgccgacgatctggtgaacaggcagagtaccggaacgcataccgcgctcgtggccgccgccgtggatttgcgcttcgatacgaatacgcggcttacgacgcacgtacagcgcgccgatgcctttcggaccgtagattttgtgaccggagaaggacatcaggtcaactttcagctggctcagatcgataggcagcttgcccacgctctgggtggcgtctacgtggtaaatgataccgcgggcgcgacacatctcgccgatggtagcgatatcctgcaccacgccgatttcgttattcacatgcatgatggaaaccaggatggtgtcgtcacgcatcgctgcttccagctctttcagatcgataatcccgttgctctgcggcgccaggtaggtcacttcgaagccttcgcgctccagctgacggcaggtatccagaaccgctttatgctcggttttgctggtgatgatgtgcttgccttttttctgataaaagttggctgcacccttgatcgccaggttgtcggattcagtcgcaccagaggtaaagacgatttcgcgcgggtcggcgccgaccagctcggcaatctgattgcgggcgatatcaaccgcctcttcagcctgccagccaaaacggtgggaacgggaggccgggttaccaaaggtcccgtccatggtcaggaactgcatcattttctcggcaacacgcgggtccaccggcgtggttgcggagtaatcgaggtaaatcggtaatttcattgctcttaaactccgtacatcactcaatgcaaggaatcaggcaaccggcttgatgtacgaccgagtacacggaatgtcggagcatcccggcctgattctgaaagctctttataatcgttgtcccgccgtttcgcgccgccttgccctgtcagccgcagcccgaaacgggacgggtcactcaggcgcgcagtttaacgtcaatcgcgtcctgggtgcgcgcattgcgctgggtttcgtgctgatgctgacgaccggaaacatcgaggatctcctggttattcaccagttccccgagggtgatattgttcaggaagccggtcaggcgctcgctcaggtcgcgccacagcgcgtgagtcaggcatttatcgccgccctgacagccgcccttgccctggcaacgggtggcgtcaacggattcatccacggcgctaatgacttcgccgacggcgatactgccggcatctttacctaacagataaccaccacctgggccacgaacgctggaaaccaggccatttttacgcaggcgagagaacagctgttccagataggaaagcgaaattccctgacgctctgaaatatctgccaacggcaccgggcccgtttcagagttgagcgcaacgtcaagcatcgcggtcacggcataacgccctttagatgtcagtctcatgtcttacttaacctcaaactcgcccctggccgggctttttattaatatgggtattgcatagcagggccaagtctgacattcccgagtaatttggtcaactatttacttgactgttttagtcaggtatttggctttccgtgccgttttacttccgcatagcctgataccttcatcgcgccaggcgagcccgattcgttgcccggataagcgaagcgccatccggcgttaacgcggttacttacctttattctgctgctcaatagacgccagcatgccgcgcaggatgttcaactcctggctttctggacgcgcgcgggtgaacagacgacgcagcttgttcatcacctgccccggatgattcgggcggataaagcccgtcgccagcagcgtctgctcaagatggtcgtagaatcgctccagatcgtccaccagcgggtacggcgcctcttcatgctcaaccgccggctgcgcttgctcctgcgccgccagccaggccatccgcacttcataggcgataacctgcaccgccatcgccaggttcagcgagctgtactccgggttggcggcgatcgccacgtgatagtggcacttctgcagttcatcgttggtcagaccaacgcgctcgcggccaaagaccagcgccaccggcgcatgctgaccttcggcgacgcttttcagaccgcattcgcgcgggtcgagcatcggccacggcagcgtgcgggagcgcgcgctggtgccaaccaccaggctacagcctgccagcgcttcatcaagggtatcgacaatctgcgcgttgccgatcacgtcgctggcgcccgcggccagggctatcgcctgcgaatcgggtttgaccagcggattgaccagccacaggttagttaagcccatggttttcatcgcgcgggctacggagcccatgttgccggtatgggaggtttctaccagtacgattcgaatattttgcagcattatggttcttcggctaaagattattcgtgcatgctaccataaaacggagacataagcagatttggctgctattatatgcgccgttttttcccgttctttaacatccagtgagagagaccgatgcatccgatgctgaacatcgccgtgcgcgccgcgcgcaaggcgggtaatttaattgccaaacactacgaaacgccagacaccgtagaaaccagccagaaaggcagcaatgattttgtgaccaacgtcgataaagccgccgaagcgattattatcgaaaccattcgcaaatcttacccgcagcacaccattatcaccgaagaaagcggtgaacacgctggcgaagagcaggatgttcaatgggttatcgatccactggatggcaccaccaacttcgttaaacgtctgccgcacttctctgtttccatcgccgtacgcatcaaagggcgtactgaagtcgcggtggtctacgatccgatgcgtaacgaactgtttaccgcgacccgcggccagggcgcgcagctgaacggctaccgtctgcgcggcagcaacgctcgcgacctcgacggcaccattatcgcgaccggcttcccgttcaaagcgaagcagcacgccaccacctacatgaatattctcggcaacatgtttaccgaatgtgccgacttccgtcgcaccggctctgccgcgctggatctggcctatgtggccgccggccgcgttgacggttactttgagatcgccctgaaaccatgggatttcgccgcaggcgagctgatcgcccgtgaagctggcgcgattgtctgcgacttcaccggcggtcataactatatgctgacgggcaacatcgttgccggtaacccgcgcgtggtgaaagcgatgctggcgaacatgcgcgagcagctgagcgacgcgctgaagcgttaatctcttactgatgtcaaaaaggaagccgcggcttcctttttttatgtcattttatcatgttgaggatctggcgaatcaccgcattgccgccaatacagagcaccgtcaggccgctaaataaggccagcggtccgcgccagcgcagacagccctgcgtccccagccagcgccggaaacacagcgctatccctaccgtcgccaggcgggctaacagcacgccgaccatcgccggaaccagcagcagccatccccacagaggcagctcatactgctgcgcactgagtaaaatccataccagctgaaacggcagataaaagctcagggcaaagatcagcggaatgcgaatattgcctgccggtgcggcaacgccctgaaagtcgcgccagccgtcgcgcagcagtattccagccagcaccagcgtggccagatagcatacgtcgttaaagatgcccacgatctgcattagcctgtcgctgcttagcttacccataaacgcgaaacgccagaaaatgatcaccagaaaaccgaactgcaacacccagctgcgcaggatccagtcgaccatctcccgcggcgagggctggttatgcacagcccaggcaacaatgggcagtttactgtgaccgggatggcaaaaggccagcacgaagcccgacagcgttagggtggcgtaggccaccagcggaatatccgcgacactcgccaccccgaatcgcataacatacggcatagcgtggtagacacgcaccagatctgacggccaccagctggccagggctggaaaccagaatacgagcgccaggcccgccagcagcccggcggcgccggcgcagccataatagaaccgcccgctctgcgcgggagaaacgatatttgcggccatagcgactccttgtcatccgccgaaaagcggaaaactagagcatcgcttcgccagcggcaagcgctggcgcccactttaggatttgcgcccggcgtctgtctaaaacggacggatcccaccgccggcagggacggcgctgagccacatcacccctgccgccgccagcaatatgacgccgccggccagcgccagcgtcgcccaactaacctgcttccataacgctggcgcctgatggcgactgaggcggatcgccagttggcggaacccatgcaccaacagcgccagcgccgtgatagtcaacgaggttcccgccgccatcgccagcgccgccgccatcccccagccaaaaacgccgattaccttgctgaacagcagaaccatgatcgcccccgagcagggacgcatgcccatcgacaggacaatcgcggcgcgagcccgccagtcgtcgccggcctgcagctgctccggggccgggagatgctgatgcccgcagccgcagtgttcgttatgaacatgatgcggggtaaaagcggtaaacgttggccggcgcagcagcagacgcagcttttttaacgcccgccagcacagcagcagccctaacgcacccaccagcaaatagcttcccttctccagccagaaactgctgaggtgcagctggcgcgccggcagctgcagcagcgccagcaccacgaccaccagcgcgatggccaccagcccctgtaataaagaggcggccagcgtcaggccaatgcttgatttcagcttcgcgggatgggtggcaagccaggtcgtaatgacaattttaccgtgtccgggccctaaggcatggagcaccccgtaaaccaagctaacccccagcagcgacagccctgccgccgccgggttctccgccaccgcctgcagcaggcggctgagttccagattgagcgaacgctgccagactgcgctctgcatcagcacctgcggccacgcccgccacagccaaatgccgccgatgatgctcacagccagcaacagcgccagcggccacagcgctttccagcgcgaagatcgcgcgcgcggagtaaaaattactgacatgtcagggtcaccttctgggcaaaatagctgcccagcgccatatcctccggcggcgcatccgctttatccagcgactgggcgtatgagagcattttgtcgttcggttttggcgtcatcaccgttgccttacaggcggcccgcaaccctgcgggcagggaaaaatcgctatccttgtcataaaacatatcgacgtagtaggtcgggtcgaaggtggaaaaggtaaacgtctgcccggcaatgggttgcggcgtcgccagcggcagagtaaaggtgagtaccgcctgcagtccgtcacgttcgaggccgtaaccgtcgggacgattgtcaaatttaacccgctgaccgttatgccacagctcgctgaaatagtgctgaccgagcacgttggccatcacctccgccgccagctttttccagacttcgctgcccggtttggcgtttccggcatcatagagcagatccgatgaggtaatttcatccatcgtccagcgcattttaaaggcgctcagcagaccgtccttgaccaccggctcgctttgcaggctgatgaagctatgcggatgcgcagcggccgaccatgataaaaccatgcaaaacgccgcgcttgtgcattgtttcactctgttcatctgttcctcacgtgaaaaattctgtgaacttcgccagcaatcctgagtaaaagcggacgctcttccctgcccacgccgcggtcattgtctatccttagcggaaaccctaactggaacttaccagatgatgaccgtcattgaaccaccatctgcgctttccagtccacagcgccgtagccaggtgctcctgatgttttatctgcccggacagtcggtgacgactgaacggcttggcaggatcaacctcgttgatgagaccacggtccggcaggatattgaggagaccggacgcgaaattcagcgttaccaccgtttgaccctccagtcacaggtggacggcagctatcggattgaaggcgccgcgctcgaccaacgtttatgtctgctgcatgcgctgcggcgggggctgcgcctctgcccacagttcgttaatcatcattttacctcggcgctgaaaacgcagcttaaacaggaaggcattgcccgcaccttatacgatgataccaatctgcaggcgctggtgaaccgctgcgcgcgggcgctcaatcgccagtttgactgccgcgacgtgcagtttctgcgcttgtacctgcagtactgtctgctcgaacatcaccggggatactctccggacttcaatgaggaacagcaacgctgggctcaaaccgccgccgagttcaccctggcgcaggagattgtccgccactggcagcgtcgggtcggcgctccgccccatgtcggagaaccttttttcctctcgctgctgtttatgttgctcaaaacccccgacccggtccgcgacggtcacccgcacgatcgccgcctgcggctggctatctccggcctgatccaccgctttcagatcctcgctggcagagcgttcagtgatgagcaggggctcagcgatcaactctatattcatttgtcgcaggcgttgatccgcagcgtgtttgctatcggcatcgacagcacgctcacagaggaagtgacccggctctaccctcgcttactgcgtaccacccaggcggcattgagcgaattcgaggaggcctggcacatccgttttaatgaggaagagaccggtttaatcgcggtgatctttggcgcctggctgatgcagaaaagcgacctgcacgagaaacaggtgctgttgctaaccgatgacaacccagctattgaagaggccctggaacaacagctgcgcgaactaacgctgctgccgctgaatatcaaataccagagcgtagagcgctttcagaaggaaggtgcgcccaaaggggtgacgcttatcgtcaccccctatgcgacggcgctgccgctgttttcgccgccgctgatccacgcggagaactacttcactgaacgccagcagcagcatatctgcgccatgctcgaggactaggccgccaccgcttttggccgtatagccatcgccgggagcgtcagcagggccatcacccagaatacgccctggtgcaggtgctgatagaggaaaccggcgaagacggtcatgatggcaatactgccgcccatcgccaccgcggagtagacggcctgcagacggatcacttcgctaccctgacgggcggcgatatagcgcatcgccgccagatgacacaccgtgaaggtgccacagtgaaggatctgcgcaaggatgagtcccggcagcgccgtggtccagcccatcagtccccagcgaatcagcccgcagacggcggagagcaaaagcaggtcgcgggcgctgaagcggcggaacacctttttactcaacgcgaagatcaccacttccgccaccacgcctaacgaccacagataaccgaccgccgaggcggaatagccggcctgctgccagtagatggcgctaaagccatagtaggcggcatgcgctccctgcagcagacaaacgcaggcgagaaagcgccagctttggcgcaccagcgtcagccaggccgccattccggccccctgctgctggcgcgactccccctggggcatcaccgacggcttaagcagcatgccgagcagcatcgaggcgacccccaggcttagcatcagcaggatcgcccggtaatcgaacaggctcaccagcttgccggtcagcgccgaaccaatcacaaaggcaatagagccccatagccgcacccggccatagtccatggtgatctgcttttgccaggtgttggccagagcatccgtcagcggcaccagcggcgaaaagaacaggttgaagccgatgatgatcgccagcagccatgctacgtggctgccggcccagaaggccagcgcgaagagcaaggttaacagcgccagcacgcgcagcgcggcgatcagccgggagggatcgctcacccgcggggcaatcagcagactgccgagaaaacgggccaccagaccggcgccaagcaaaatgccgatggtttccggagtcagcccgtttccggccagccagacgctccagaagggcagaaaaataccgtagctaaaaaagtaggtgaaataactgagcgccagccagcgcgtggagtgcaagaccatgatttcctcccgaatggtggcgatagtctggcgataaaccccggcgggcgcaagatgctcttgtctgctgatagctcgttatttatgccccctcgatgatgattttcagcgaaaaattcagcttctctcccgcgcctaaaactcgcagccccggctgcccgtccatgttgtgggcgtttaccggatggctttgcggctcgaggcaaaggaatgattcaccttgcattctgaacagcatcaaccacggagtttgcgatagaattgtgatattcatcacgtcattgcttaccctcgcccgcccgccccagccggaataacccacgttcagccaacgatcttcaccgaactgagccacgctgaaattggcatagtcgggcaagtttccttgccagttgagaggtaagtgattttccccttccggccagtaaccgctgacctggaactgaaccttgctgcgttcatcgaaagggaaaaagggatgaaagccgcagccgtaaagcgcagggacctccccatagtgggtaagcgttagctccgctatcagctggttacgcagcaactggtagcggagctgcgccagataatcgaaaccgcaggcatgctgccgacgcagctgtaatacacaatactcggcgccgtactcaataatatcccagcgctgtaaccagccgtcaccgtgaagaaagaaatactcgtcggcatggtggcgaggcaggacaatctcctgcccatgaaaaataaaacggttgccggcgacgcgattggccaatggcagcatcggaaacatgccgccggcgggattttcatatagcaccggcgcttgatattgccgcgagaataaactttgcactttgccgcccagagaagagacgcacatccgcagatgcgcgttctccagaatccactcttccgccattagcgcatctgctcctgcttcgccgcattcacgcccgtatgacgctgcgccagctgctcttccagcgcttcgagggtgatacctttcgtttccgggacgttgcgcaggatatagaggtagccggcagcgcaaatgacaccatacagcaggaagcttcctgccgcgcccagaccggcattaagcagcgggaaagtataggttaacaggaaacaggcgatccacagcgccagggtacctaaagacatcgcgagtccacgtacgcggttgggaaaaatctccgccagcagcacccaggtcaccggcgccagggtcaacgcataaatagcaatcgccgccagcaccagcaacagtaccggccaccccataatgcccatggcgtaagcgccggcgatcagcacatagatcagcgtcaatcccgaagcgccaagcagcattaatttacggcgaccgattttatccaccagcggcagcgccgcaatggtaaagaccagattaacgacgcccgtcgcgacgatagatttcagcgtgctgttaatatcgaaccccgccgaggcaaaaatctcctgcgcgtagttaaagatgacgttaatcccacaccactgctggaatatggcgagcaccatgccaatgatcacaatcggtttcacctggggagccaacagcgcgccgtaggagactttattgttatccttttccagggtatgcgcgatttcacgcaggatcctgtcggcatagtcggcagaaccaatgcgttccagcgcagcccgggcgcgctccggtttaccggccttcatgagccagcgcggcgactcggggacaaaaaacatcaggaccagaaacgccagcgccggcaccagttccgcaccgaacatccagcgccagcccatctgcccattccagctgtccacaatcatctgctgcgtcgcccccggctccaccggttcagcaatcatcagattgattaactgagcggccagtacgccaatcacgatggtgagctgattgaccgcgacaaaacgccctcttttctctgccggactgacttcggcaatgtaaagcgggctgagagcggaagccagaccaatccctacgccgcccacaatgcggtaaaccacaaacatatcgaaatgactggcgaccgccgtcccccaggccgacgcgctgaacagcacggcggaaagaattaatggcagcttgcgccccagtttgtctgcgcaccatcccgaaattaatgcgccgaaaatacagcccaacagcgctgagctcatcgcccagccggactgcgccgggtccgtaattgaaaaccaggcttcataaaatggcttagcgccgccaatcaccacccagtcatagccaaacagtaaaccaccgcaggcggcgaccagacaaatcgtccagacgtagcccattttcagatgtgtctgcgcgttgttcataatgattcctctataagggaaacgcagggaacagtagggttcaggcgggccgagcccgcccattgaggttcaggaaaaaatgccgctttgcagggcatggcgaatcagatgcgccttatcatgagccggatttatttgcagaagctgctgcatcctctgctggcaggcggatacgttgcccagccccagatggcccagcgcttcaataaacaagcagtgctgcagatgtctctgctgcgctgatacatcgagaaccaccaggtccggaagagagacggcaaaaaaatcgacttgcggaacgtcatcccgatgctgcgcggcccagtcgataaaatggcggaagtgctgctcggcctgcgctgggttaccgctcttacgcagcgcaatgccctgccagaaaaggtaatcggcgggttgatcgttgtagtaccgcccggcgtccagcgttgagcccccttgccgggcaagctggtaatattccgccgcctgctgcgcatccccagcctgttctgcgcagtagcccagcaaataccagatatcgttgtccgtttgcccaggcagccgcccctcccccagattgtcgggatagcgtaatgcggctttcagacagtccgtggcctgtttaaacgccccacgctcgatgaactgtaatgccagatggagctgattgagcaaatactggccggtgattttcccttctcctccttcccagggatggaatacgcgcgtatccagaatcgcggcggcatcggcataatgaccggacgcgttccacaggcttagcagctcagcggtcaggtcgtcccgcttcagcaccacggctttacgttccaccagcgtcgtcagtcgctcatgtaccggcctggccagtaatttttgcaaaaaatcgagttcaaacaggaagcgcgcattgtccggctccagcgctacggcgcgctgcagataagccagcgcctgcgttgcatcctgctgtttattccacgagtaaacgcccagcagacgatgagcgggcgcataatcgggagatttttcgagcgtctcgcgccagcagctcaccgcctcgtcatagcgacgtttgctgtaccagaagcaaccgagtagatagcgggcaaaagcgctgtcgcccagcgactgcagcatctgaacttcatcgagtgagttagggaaacgaacattgtgcgcatggcagtgctcggcggcggcaataaactgttggcgttcattggcatcatcacttagcgacgcacgccagagcatcggcagcgcttcctgactgtccagaaccgcaagaacctctttcaccgccgacgtctgtccgatagagagcaaccaacccgccagcaggctggcgttgacccctctgcgccccgtgatgcgcagcagggcttctcgcgcgtcgtcgctccgctcaatcatccagcgcgcgcagtgcagcggatagctcaatgggtattgctcaagagaggcgaaaataaactccagcgctgctttcttctgcccactgttggctaatgccagcgctttcaaccccatcgccagaggattgctggcgttgaaccgcagactggtgtttactttttccagcgcatcggcaacatcaccgcgcttcatcgccagcctcgccagcgaccaccaggcggcgtcacggcagttaccgctccaggaggctttgtaatagtgatcccaggcgcctgcatcatcccccatcctttccagcacgctggcaagcagcatactggcttcgccatctcgcgggttcttattcaaacgatgcgcgcgctgtagcgcagcacgggcacactgttccgccagcgcccagtcggcactgttgaacgccagggtaccgagggcaacattattgcgataatcctgcggatcgagctcaaccgcccgacgatagtaatccccggcgtagcggcttgcgtggttgtattgttcaaggtgctggccgataaaatagagctcgtcgccattgtggatcgcttccggtaacgcgggcgctatagctggttcgggcagcggcgtctgttgggtaatatgttcctgataatccagcagcggctggttctcggcggttttcactttgagggttaagcgcccgacgccattttccggcagcgtctgctgccagctctcaccgggcttcagcgtcagctgagtttcgtacaatggctgatggtcagcgctgagttcaaccacgatatgatttagcggagcaatggcatatacgccaagctgcagttgcccagactcgcgaaccagcttcagtgccagctgtgtattggcattttgcaccatccctaactcgctgtagggaaggaaattttgcacaaacaccttctcttcataaggcgcaagccacgtaaagtcaggctggttatcggtgaagacgccggtcatcagctcaatataagggccattttcatcagtcagatttcgatcccaggcctggccaaaatccccgtacccccagctccactgtttcttgccaggagagacatggtgatcggcaacatgcagtaacccgcctcgctcgtcatgatgataagcgccgacaaaatcgtaatccgacttctccgccatatacgaagtgggtaccgggacgtttttataacgggagatatcaacccccgcagaatagtccactttgtagtaggtaccggtggcaatcgggaaagcggaaacatcacgcttaccatggtcgaatacagcggtgacatcgggtgggaatacactctggtgggcatcgccgccttttactgcagggttggcccaccacaggaaatggcgcggcgtggcgttaccattgaagatcttgccagtgatttcaatcagcgcgcggtcaggatagagcgtaaacccggccataacctgcaaaccgcgcatgggctccgcttcccccatccatacggtctgcgcgccgttttctccctgctgaatagaaaaatcgaccggcttaaaggtcgtcggccggtgatgttgcggccagttaaattcgattccgccggagatccagggcccgagcagccctaccagggctggcttaaccacctcattgtaatagacgaaatcacgttgtttgactttatcatatgcccggtgaatacggccgccaagctccggtagcagcatgacccgaaggaaatcattctccatccacactgcctgataatcgcgcatttcgcgttcgccggtcagggtatcaatcacgccgtagggatagacgctgccggaagatccttgataaacacgtttttccagaaacatagggttcggatcttccgctcccgtcgtccacgttggtaatgaaatgatttcctgccagaccttaaccgaaccgtacatgatgcctccactaaacaaaacgaagtaaaagttgcaataacaggagtctatatcgccaattcgctgttaaaatgcgcaatgctcacgcaatatagttaagggagttaagtgtatgcagcgtactggctttaataacgcccgggtccggcaggccaataagtcgatttttctttcccatctgtggcgggaaaagcagctcagtaaatcacagctctctcaactcaccggtctctccattccggcggtgagcaatattctggccgagctgcttagcgagggattgatcggtcactcaacggaacacttgagcaaacggggcgtgaacagcggcagctaccagatccccgagcacggcgcctggacactgtgcatgaatatcaccccgaccagcattgaatatcagcttgccgacgcccgcctgctggcagtggatggtcatcagcatttgccggtcaacgcgcccactcctcaggccctgcttgaggccattgttgaatgctggcggcatatccaccgccgctacccgcagcacagcatcaatctcgcccttggcgtgcatggacaggttgatccgattaccggcgtttcacaaaccatgccccaggcacgctggaaaacaccgatcgaaataaagtatctgcttgaggagcggcttggcgtgcaggttcgggtggataacgactgcgtgatgctggcgctggcggagaagtggcagcatcagggtacacagcaggatttttgcgtgatcaacgtcgactacggtatcggctcgtcatttgtgattaacgatcatatttatcgcggcagtctgtacggcagcgggcagattgggcatacgattgtcaatcctgacggcaaagcctgcgactgcggaagatacggttgcctcgaaaccgtcgcctctctcagcgcgctgaaaaaacaggcccgaatgtggctcaaaacgcagcctgaagcaacgctctcccctgagcagttaaccacggcgtcgctcattgaggcctggaaagagggagatgtgcaaattcgcgcatgggttgataacgctgccaacgcgattggcttaagcctctataatttcctgaatatattaaatattaatcaaatatggctttacgggcgcagctgcgccttcggtgagcagtggctggaaagtatcgtcaaacaaacgggtttcaacccctttgaccaccgggatacgccgcgagcgcacgccacccaaattggctttggccagctgacacgcgcccagcagctgatggggataggttatctgtacgttgaggagcaattgcagacgctggtttagtcataaacgaacgtggcggagcgcaaatttgtgtattacgtttaaatcacacgtctctcataacgagctgattatgaacacactccgctattttgattttggcgcttcccgctctctattgctgcttatcgcccgcatcgccgtggtgattctgtttattctttttggctaccccaaactgctgggctttgacggtacggtgcagtacatggccgcctccggcgcgccgatgccgaccctggcggcgattatcgccgtcattatggaagtgcctgccgcgattctgattgtgctcggctttttcacccgcccgctggcggtcatctttattttctacaccctgggcacggcggtgattggccatcactactgggatatgactggcgatgcggtattgccgaacatgattaacttctggaaaaacgtcagcatcgccggcgctttcctgctgctggcggtaaccggccccggggcgatctccctcgaccgccgctaatctccagacgcaaaaaaggccgcatacgcggcctttttgatgtcaacgctaacgcttacgcatataccgggaagcgggcgcagatatccagcactttacctttcacgcgctcaatgaccgcgtcgtcattgatattgtccagcacgtcacacatccagccagccagctctttgacttccgcttctttaaagccgcggcgagtcactgccggagaaccgatacggataccggaggttacgaacgggctcttcggatcgttcggcacgctgtttttgttgacggtgatgttggcgcggcccagggcagcgtcagcttctttaccggtcaggtttttatccaccaggtccagcaggaacaggtggttctcagtaccgccagacaccactttgtagccgcggttcaggaacacttccaccatcgctttagcgtttttcgcaacctgctgctggtaaactttaaactctggctccatcgcttctttcagcgccaccgctttcgccgcgataacgtgcatcagcgggccgccctgcgcgcttgggaacactgcagagttcagttttttgtacagctcttcgctaccgcctttcgccagaatcaggccgccgcgcggacccgccagggttttgtgggtggtggtggtcacaacgtgagcatgcggaaccgggttcgggtacacgccagcggcaatcaggcctgccacgtgcgccatatcgacgaacaggtaagcgccgatgctgtcagcgatttcacgcattttcgcccagtcaacgataccggagtaagcggagaaaccaccgatgatcatcttcggtttgtgttcctgagcctgcttcgccatgtcgtcgtagtcaattttaccggactcatcaataccgtaagggatgatgttgtacagtttgccggagaagttaaccggggagccgtgagtcaggtggccgccctgcgccaggttcataccgagcacggtgtcgcccggctgcagcagcgcggtgtagacggcaaagttagcctgggagccggagtgcggctggacgttagcatagtcagcgccgaacagttctttcgcgcggtcgattgccagctgttcaaccacgtcgacgtattcacagccgccgtagtaacgcttgcccggatacccttcagcatatttgttggtcagctgagagccctgcgcctgcataacgcgcggactggtgtagttttcggaggcgatcagttcgatgtgctcttcctgacgtactttttcctgctccatagcctgccacagttcggcatcataatcggcaatgttcatttcacgctttaacatccgcatctcctgactcagctaacaataaaatttcggcctaaaaaggcggtccgattggacaacggcccacagtataaccgaatcattctgtgataacaggtcttgacaaaggattttacgcaaacgattggctccgcatgacacaaggctttgagcaataacgcctctctcagtatcaacggatttcttttcaggtttgtgatgcaaattcttcatgttgtaactggatcgggggaatgtgttaaagaaccatttacaacgcagggttatttctttaagatgcatttaaaatgcatcattaagataacacataaggaagcacgctatgcttgacgctcaaaccatcgccacggtaaaagccaccattcccctgctggtagagaccggcccgaaattaaccgcccatttctacgatcgtatgttcgcgcataatccggagctcaaagagatcttcaacatgagcaaccagcgcaacggcgatcagcgtgaagcgttattcaacgctattgccgcctacgccagcaatatcgataacctgcctgccctgctgccggcggtggaaaagatcgcccagaaacacaccagcttccagatcaaaccggagcagtacaatattgttggcagccatctgctggcgaccctcgatgaaatgttcagtccgggccaggaagtgctcgatgcctggggtaaagcctacggcgtgctggcgaacgtctttatcggccgtgaagccgagatctatcagcaaaacgccagtaaaaccggcggctgggaagggacccgcgcgtttcgcatcgtgaagaaaaccccgcgcagccagcttatcaccagctttgagctcgaaccggttgatggccagccggtcgccgattaccagcctggccagtacctggccatctggctgaaaccggaaggcttcgaatatcaggaaatccgccagtattccctgacccgcaaagcggacggcaaaggctaccgcattgcggttaaacgcgaggaaggcggtcaggtttccagctggctgcataaccatgccagcgaaggcgatgtggtctatctggccgccccggcgggagatttcttccttaacgttaagccgcagacgccagtcaccctgctctccggcggcgtcgggcaaacgccgatgctggcgatgctggatgcgctggcgaagagcggtcatcagggtcaggtgaactggttccatgcggcggaaaatggcgacgttcacgcctttgccgatgaagtgaaggcgctcggcgcggcgctgccggcgtttacctctcacgtctggtatcgcaccccgactgaggccgaccgtcaggctggacgttttgatagcgaaggtttgatggatttagcagcagtggcggacaatattcgcgacccgcagatgcagtattatctctgcggcccggtagcgtttatgcagtttgcagcgaagcagctggtcgaattaggggtcaacaaagacaacattcattacgaatgcttcggcccgcataaggtgctgtaagccccgacgacgcggggatctgtaggccgggtaagcgcagcgccacccggcaatactgcagcgagcggcgagcgttaaatcgccgcgtcgtcttcttcgccggtacgaatacgaatgacccgcgccacgtcgaagacaaagattttaccgtcgccgattttaccggtctgtgcggtacggatgatggtatccacacaggtatcgacgatatcgtcggtcaccacaatttcaatttttactttcggcagaaaatcgaccatatactcggcaccacggtacagttcggtgtgccctttctggcggccaaagcctttcacttccgttaccgtcatcccggtgatgccgacttcggccagcgcttcacgcacgtcatccagtttgaaaggtttaataatcgcatcaatctttttcatggggttcctgtcttaatcgcgtaaccggttgcttaccgtatcataacttgcgctatagtgcggagctactctttaaagtcgttggcgtcgagctcatggcgcgacagcagcttatagaattcggtgcggttgcgccctgccatccgcgcggcgtgagtgacgttgcccttggtaatttgcagcagcttgcgcaggtagttcagctcaaactgattgcgcgcctccacgaaggtcggcagcgccgtgttctcgccctccagcgcttgctcaaccagcgcgtcgccgatcactggcgacgaagtcagggccacgcactgctcgatcacgttcaccagctggcgcacgttgcccggccatttggcggccatcagccgcttcattgcatcgctggaaaacgcccgcacgaacggcttatggcgatcggcggactgacgcagcagatggttggccaacagcgggatgtcttccgtacgttcggagagcggcggtattttcaggttcactacgttgaggcggtagaacaggtcttcacgaaactcgccgcgggccatcgccttcggcaggtcgcggtgggtggcggagataatccgcacgttgatttcgatatcgcggttgctgcccagcgggcgcaccttgcgctcctgcaggacgcgcagcagcttcacctgcaacgcaaccggcatatcaccgatctcgtcgagaaacagcgtaccaccctcagcggcctggaataatccttcacggttactgaccgcgccggtaaaagcgccccgcgcatggccaaacagttcggattcgagcagctgttccggcagcgcgccgcagttgatcgccacgaacggcttatcatgacgcgggctggcgttgtggatcgcctgggcgacgatctccttcccggtcccgctctggccattaatcagtacgctgacatccgattgcgccaccatcccggcctgctcaagcaggcgcagcatcagcgggctgcgggttacaatcgcctggcgccaggcttcgtcggtggccggcgagcgctgctccagcgcctcatcaatggctttatataaggcatctttatcgaccggcttggtcaggaagctgaacaccccctgctgggtagccgccacggcgtcgggaatcgaaccgtgagcggtgagaatgatcaccggcatgccggggtggcccttctggatctcgctaaacagctgcaggccgtccatttcatccatccgcagatcgctaatcaccagatccactttctcacgccccagcacgcgcagcgcttccggcccgctctcggcggtgaccacgctgtagccttcgctgaccaggcgcatgcccagtagcttcaacagtcccggatcgtcatccaccagcagtaaacgcgccggtttacggatcgtcatggatcacctccggcactttttcgctgccgaaattgccgcccggcttgcggctggagagctggcgttcgatatccgtcaggttctccagcttgcgggtggtcagctccagctgctcgcgcagcgccagctcctgctgacgcagtgtctccagttcgctatcgctggactgctgaagcttcgcgtaacgggcacgctcttccaccagctgcagctgacgggtctggccgtcgcgccagagctgatacagcgggcggacctgaacggcgatttgcgggctgaaggtatcgagacgcgccaccaggtcgcggcgctcctcaggggtaattttagcatcagcaagcaggatgccgcgacggaacgcgtcctgccagctgtcgtcggtatggcgtttcgcctccgcccgcgcctgcgccggcgcgaggcgatcggcacagtcaatgccccgcagccagtagaggggatttttgtcgctggcatcgctgctgtgcgcccagatatccgcgcagtctaccgcgacaaaatcggccacctgatgctgcgcctgcccgggggcggcggtaccttccgcggtatgcggtgaaaagccggcggaacaccccgccagcgtcagacaagcaatgcctgaaagcagccatccgctgagggaacggcgccaggccaggaattgggacatagttccccgatatcgattcataagttggattattccggcgctgagggaagcgtaatgcgaaaacagacctgcccggcgggcgcatcaactaagctgagctccccttgcatctgccggacgcagtcgcgggcgatactcaaccccagtccactgcccttaacggcccctttacgctggtgactcccctggtaaaaaggctcgaatatcatgtttttttccgcggccgggatcggttcgccgctgttggcgacatcaatacgcacctgatctccgtgccggtagctatggatacggatgttaccggattcagcaccatagtgcaccgcattggagtagagattatccattacgcttatcaatagcgcaggctctgccaggcaacgccgcgcctgcagcgtcagttcggtatgcatcagtttagcccgcgcgggcaggctgtgcgccgccacgacgttttccaccagttccaccaggtccaccgcttcgcgagccaccgggccgtcggcctgttttcggttatagtccagcagctgttcaatcagcttttgcaggttacggctactgctgtcgaggatctcgacaatctcctgctgctcaggggtcaggggccccgcgacccggtcggccaacagctcggtaccttcacgcatactggccaacggggttttcagctcatgcgacagatggcgaagaaattgatgccgctgcgactccagccacgccaggcgctcgctgagccagatgatgcgcttgcccaccgatcgcagctcgcgcgggccggtaaacaatgcggcgtcgtccagcgactttcctgcccccagctgattgatcattctttcgatgcctttcaccgggccgataatcatgcgggtgaagagtagcaccagcgccaggctcagcagaaacagcaccagcgcctgccagccgaaaaactggccgcgttcggctatctcctgctgcagctgttggccacgagaatagacgaccgcccgggtcgcctgcaccatatcgctgttattactggcgaaaacttccagtctggcggctgcctgggcatcgggtccgctatttttacactgcagctgcgccagatcgctgacatcctgacgcagcgcctgccagagcttctcgtccggcagcacgccggcgtgggcgtccagcatctggctgtagcgctgccgctggttttgatagacgcgcgccagcgtcggatcgtccagcacgcagtactggcgatagctgcgctccatctccagtgcggcattgatcatcgcctcgctgcgtcgggcgtcgaccagggtggtacggttaatatgcgccgcctgggcgctaagggcgttcaggctctgccaggcctgccaggccagcaccagcaatggcagcaggatcagcacaaaagagagcgtcaccagctgacgcagcgaacgggggaaaagagagagtcgcttcaaggatgttgtctcaatcattagctctggtcgatgctaactgaggagcgcgccggagaaaagcgctaccgctggttactgcgccgcagaaacaacaaagccaggcgcaaggcctggctttgttcaggaatgaggcggtgccttactcgacgtttcgcccgatgtctgataaagccaggctgttatcaggagttggacggcaggcacctgtttgtgcgtcattcgaagtttatgtagcgcgtcccgaaggggctgacataagaaggtgaatgagccactggttaatattatgcatgaactatgccagctctcaaaacattttattaacatactgatatatatgacattaaccgcaagaacagtcgaactacctctgtttatttttcacccgcgttgtcgctatttagcgacaccaaataggctaccgattactcatcatttaaatcaataacttaagtgtcgcctattgacgacactgcaatatcgcagttgtcggcaattcccgacaccctggcgtgccgaccatcacagataaaaaaaagccccctgtcaggcagggggctgatacgttcgcgtgaagcgcggcgggaagattaacccagctgtttacgcgcgttacggaagatacgcatccacgggctatcctcgccccagttctccgggtgccaggagttgcttacggtgcggaagacgcgttccgggtgcggcatcatgatggtcgcgcgcccgctttcgctggtcaccgcggtgataccgttcggggaaccgttcgggttcgccggataggtttcggtcactttgccgaagttatccacgaagcgcagcgccaccagacctttgctctccagctgagccagatgcgcgctgtcgcgcacttccacctgaccttcgccgtgggagaccgcaatcggcatccgtgagccaaccatgccttccagcagcagggatgggctttgcgtcacttccaccaggctaaagcgcgcttcaaagcggtcagactggttgcgcacaaagcgcggccacaggtcgctgcccgggatcagctcgcgcaggttggacatcatctgacagccgttgcacacgccgagcgccagcgtctgcggacgatggaagaaggtcgcgaactcatcgcgcacgcgctcgttgaacagaatcgacttcgcccagccctcgcccgcgcccaacacgtcgccgtaggagaagccgccgcaggctaccagagcatggaaatcgcccagaccggtccggccggccagcaggtcgctcatatgcacgtcgatggcgtcaaagccggcgcgatggaaggcggccgccatttcaacgtgggagttcaccccctgctcgcgcaggacggccactttcggccgcgcgccggtggcaatgtacggggcggcgacgtcgtcgttaatatcaaacgagagcttcacattgaggcccgggtcggcatcattggctttcgcctcatgctcctgatcggcgcaggccgggttgtcgcgcagacgctgcatctgccaggtggtttccgcccaccacatgcgcagcgtggtgcggctttcgctgaacaccgtctgaccgccggcggtcagcacgaagcgatcgccctcaaccgctttaccgaggtaatgcacgcagtccgccaggccgttaaccgccagaatggcttccaccgcctcacggtctgcggcgcggacctgaatcaccgcccccagctcttcgttgaacagcgcggccagatggtcgtcgcccagcgcggcgatatccgcttccacgccgcagtggccggtaaaggccatttccgccagcgtgacaagcagaccgccgtcggagcggtcgtggtaggccagcagtttacgctgcgccaccagggcctgcatcgcattccagaagcctttcagttgcgcgacatcgcgcacgtcagccggcttgtcgccgagctggcgatagacctgcgccagcgccgtcgcgcccagcgcgttgtgccctttaccgaggtcgatcagcagcagggcgttatcttccgtcgaaagctgcggcgtgacggtatgacggacatcttcgacacgggcgaaggcagagatgaccagcgacagcggagaggtcatctcgcgctgctcgctgccttcctgccagcgggttttcatcgacatcgagtctttaccgaccggaatggtcaggcccagcgccgggcacagctcttcgcctaccgctttcaccgcctcatacaggccagcgtcttcacccgggtggccggcggcggccatccagttagccgacagcttcacgcggttcagctcgccaatctgcgtggcggcgatgttggtcagcgcttcgccgaccgccagacggccagaggccgcgaagtccagcagggcgaccggggcgcgctcgcccatcgccatcgcttcgccatagtagctgtcgaggctggcggtggtcaccgcgcagttggccaccgggatctgccacgggccaaccatctggtcgcgggcgaccataccggtcacggtgcggtcgccgatggtgacgaggaaggttttctcggccaccgtcggcagatgcagaacgcggttaaccgcatcggcaagggtaatcggttggcgatccagcgcgctaccctgagctttcagagtctgcacgtcgcgggtcattttcggcgttttgccgagcaggacgtccagcggcaggtcgatcggctgatcgttaaagtggctgtcgctcaggctcagatgctgctcagcggtggcttcgccgataacggcataaggcgcgcgctcgcggcggcacagttcgtcgaacagcggcagctgctccggggcgaccgccagaacataacgttcctgcgattcgttacaccagatctccagcggactcatccctggctcatcgctgagaatatcgcgcagctggaatttaccgccgcggccgccgtcgctcaccagctccggcatggcgttggagagaccgccggcgccaacgtcgtggataaagaggatcgggttggcgtcgcccaactgccagcagcggtcgatcacttcctgacagcggcgctccatttccgggttgtcacgctgtacggaggcgaaatcgagatcggcatcagactggccggaggccatagaagacgccgcgccgccgccgaggccgatgttcatcgccgggccgcccagcacgatcagcttcgcgccgacggtaatctcgcccttctgcacgtgctcaccgcggatgttgccgataccgccggccagcatgatcggtttgtggtagccacgcagctcttcgccattgtggctggtgactttctcttcataggtgcggaagtagccgttcagcgccggacgaccaaattcgttgttaaacgccgcgccgcccaacgggccttcggtcatgatgtccagggcggtgacaatacgatccggtttaccgaaatcttcttcccacggctgttcgaagcccgggatacgcaggttggaaaccgagaagcccaccaggcccgctttcggcttcgcgccgcggccggtggcgccttcatcacggatttcgccgccggagccggttgccgcgcccggccatggagagatggccgtcgggtggttatgggtttccaccttcatcagaatgtgcgccggctcctgatggaagtcgtagcgtccggtctgatggtcggcgaaatagcgcccgacttcagacccttccatcaccgcggcattatctttataggccgacagcacgtagtccggcgttttttcaaaggtgtttttgatcattttgaacagcgacttcggctgctgttcgccgtcgatgatccagtcggcgttgaaaatcttgtggcgacagtgctctgagttcgcctgggcgaacatatacagctcgatatcgttcgggttgcgtcccaggcgggtaaacgcgtcctgcaggtagtcaatttcgtcgtcggccagcgccagacccagacggaggttggcgtcaatcagcgcctgacgcccttcgcccagcaggtcgacgctggtgaccggcgtcggctgatggtgagcgaacagcttctctcccgcttccagctcgtcgaagacgctctccatcatgcggtcatgcagctccgccgccaccgcggcccactgcgcttcggtcagggttgaggcttcaacgtaatacgccacgccgcgctcaagacgcacaacctgcgccagaccgcagttgtgagcgatatcggtagctttagaagaccagggagagatggtgccagggcgaggggtcacgagcagtaatttaccggtcggggtatggctgcttaagctcgggccatactgaagcagtcgcgccaggcgctcgcgatcgtcagcgctcagcggggcattcagatcggcaaaatgaatatattcggcatatatggcgcttaccggaaggttggccgcctgaaatcgtgccagcagtttattaatacggaatgccgacagtgcaggtgaaccacgcaaaatttccatcataagtctctcgtcttcgaagctttcagggtgagccaggggggaaacgggcgtcattatagtgaatcctgcgccccgacgaaaccgtttgcgtagaaataaaatcattgatgctgtttatcaataaatgtgacgaccatcgcgaataagttgccaactggcgcattattaagcagaatgccgcacattcgacgacaaccttgcgttttttccggacatcgcctgctgaggaacctgaagctgcagaagattaactctctgaaaaaattaaagattaattatctgctgatcggcattgtcacccttttgctggcggcggccctgtggccgtcgatcccctggtctggtaaacccgagaaccgcgtggcgggcattatcgctcgcggcgagctgcgcatcagcaccatcaactcgccaatgaccttcgccaccatgaacaataaagcgttcggtctggattatgaactggcgaagcagtttgccgactaccttggcgtcacgcttaagataaccgtccggcaaaacatcagccagctgtttgacgacctcgacgacggtcaggccgatatgctggccgccggactggtctataaccaggagcgagtgaaaaactatcaggccggccccacctactattctgtttcgcaacagctggtctaccgcgtcggcaatacccggccgcgcaccctcgcggcgctgaccgccgagcagctcactatcgctccgggccacgtggcgatcaacgacctgcagaccttaaaagccgagaaatacccggatcttgcctggcgcgtggacgaaaaacgcggtaccacggcgctgatgcaggcggtgattgacggtaaacttgattacaccatcgccgactcggtggccgtcagcctgtttcagcgcgtccatccggagctggcggtggccctcgatatcaccgacgaacagccggtcacctggtttagcgcccgggacgacgataattcgctgtcggcggcaatgcttgatttcttcaacaacatcaatgaagacggcaccctggcgcgcctcgaggagaagtacctcggccacggcaacgatttcgattatgtcgatacccgcaccttcctgcgcgcggtggaaaatattcttccggaggtgcagccgctgtttgaaaaatacgcccgcgagattgactggcgcctgctggccgccatcgcctggcaggaatcccactgggatccgcaggccacctcccctaccggcgtgcgcggtatgatgatgctcacacgcaatacggcacaaagcctgggtctaaccgaccgcaccgatgcggcgcagagtatcgacggcggcatgcgctacctgcaggatatgatggataaagtgccggattcgatcccgaaagatgaacgcatttggtttgcgctggccgcttataatatgggttatgcccatatgctggacgccatggcgctcacccgcaaacagaaaggcaatcctaacagctgggcggacgttaagctgcgtttacccttgctgagccagaaaccctattacagcaaactaaaatacggctatgcccgcggccatgaggcctacgcctatgtggaaaacatccgcaaatatcagataagccttgtcggctatttgtcagagaaggagcgccagcagcagcaaacgctggccctggcggaggattacccggccgtgctccccaatgagctcgaacagccgcaggagaccaccctgccctttttcaagtttcgcgccgataagcagatggataatgcccggatgaaactccccggccacctgtattaactttccccagtctgctcccgggctttcttcagcgcttttttctcttcccgccgccagcggaagaagtcgctcagcatggcagagcaggactctgccagcacgccttcgctaatctcaacccgatggttcattcccgggtggtgcagaacatccatcagcgagccggcggcgccggtcttggcatccctggcgccaaacaccaggcgggcgatacggctgtgcaccatcgcgcccgcgcacatgacgcagggctcgagggtcacgtacagcgtggcgtcgatcaggcggtagttttgcagcaccagtccgccctggcgtaaggccataatctccgcatgggcggtggggtcgtgacggcctatcggccggttccagccctcgccaatgacctgattgttatgcaccagcaccgcgcccaccggcacctcgccctcttcccaggcgcgtttcgccagcgtcagggcatgacgcatccagtattcatcattgagttcgaggtcagacacagcggccactccagcagaaaaagcggggcgcattatacatgggcgctatcaattacacactattactccagctgctgaagctctccctgaggggttacccgccagcgatgctggcaaaagccgagcaatggattatcctgctcactatcgctatagccgctatacagccgcagcggggcgccaatctttttctccagctgtaccaccttttcatgccccaggcagcgcagggtcaatacccagccgccccagcggcgcgcggtgcggctggctatcagattcacccgcggcaaccagagggtatcgcgatagacctgctccaccagcgactgcggcgagccggtgatcaaccagacgtcggcatcggtgctggtcaggtaggcggtaagccgcgcatgaactaccggaaacgccgtcacatgatggcgaaaccagccgacaaactccgcttccagccgcttcagcaccgcctcgcggcggccaaaggttgtcgcccacagcaggaggctcatcggccagcgcgccgcccgtccgctcactgccagtccggcaaggatcaccggccccatcgccaccaccagcaacaggttcagcggcaaatggcgcagcagatagcgcagaaaactgccgaacatatcctgttggtgtaaggttccgtccagatcgaaaaacaccactctccgttcagtgtgctgcaaactgcctcctttatctcagaactcgcttctcgttagggtaagcttaacagcctgacgccatgtcgagggaaaacatcccctgccgttaagaaagaattaaagtagcaggcgaaggaaaaattgtggcttaagaatttttaattcatggtataccccttataatcgaataaaaattctgtcagtcacgagccggacggctccagcggagctccaatgaactgtttaacgcgtattcgtcagcgctatcccaccctggcggcgagcgacaaaaagttggccgattatattctgagccagcccgatgagacccggcacctcagctcgcagcagctggcagcggaagccggtgtgagtcagtccagcgtggttaaatttgcccagaagctgggattcaaaggctttccggcgctgaagctggcccttagtgaagcgctggcgagtagcccggatccgcactccgtcccggtgcataaccacattcgcggtgacgatccgctgcgtctggtcggcgagaaactcattaaagacaatgtcgccgccatgcatgcctcgctggacgtcaacactgaagagacgctacgggaagccgtcacgctgctgcgcaacgcccggcgagtgatcgtcaccgggattggcgcctccggcctggtggcgcgtaactttagctggaagctgatgaagatcggcatcaacgctgtttctgagcaggatatgcatgccctgctggcgacggtgcaggccatgtccagcgacgatcttctgctggcgatctcttactccggcgagcgccgggagatcaatatggcggccggtgaagcgctgcgcgtcggctgtaagatcctggcgatcaccgggtttagcccgaacgccctgcaacagcaggcgacccactgcctgtatactatcgccgaagaacaggcgacgcgcagcgcggccatctcctccaccagcgcgcaaatgatgctcaccgatctgctgtttatggggctggtgcagcaggatctggagcgggcgccggagcgcattcgccatagcgaagcgctggtgaaaaagctggtctgagcagaaaatgggcgtataatgcccgccctgtttgtgttgtttctgagactttcctgatggcgctgttaattaccaaaaaatgcatcaactgcgatatgtgcgagccggagtgcccgaatgaggccatttcgatgggtgagagcatttatgagattaacagcgaccgctgcaccgagtgcgtgggtcattacgacacgccaacctgccagaaagtgtgcccgatcccgaatacgatcctgaaagatccggcacacgtcgagagtgaagaacagctgtgggataaattcgtgctgatgcaccacgcggataaaatttaaccgccctcctggctagctttcgacaatcaccgtggcgcaggcgtagtggcgttcatcagcgagagtaacgtgaatagcgcttactcccatgcgttcagctaaaaggtttgcttcaccccatagccgcagcttcggcttgcccagctcgtcgttgtaaacctcgaactggttaaacgccagcccgttacggatcccggttcccagcgctttcgccgccgcttccttgaccgcaaagcgtttcgccaggaaacgcaccggctgctggtgctgctcccagatgctccattcatggtcgctcagcacccggcgggcaaggcgatcgccgctgcgggcgatcaccgcttcgatgcgggcgatctcgacgatgtcggtacccaacccgagaatggccattagccgcgcgcttccagcatcagacacttcatttccgccaccgcctctttcaggccgctcatcaccgcacggccaataatcgcgtgaccgatattcagctcatgcatttccggcagcgcagcaatcgctttcacgttgtggtaggtcagaccgtggccggcattcaccttcaggccgaggctggcggcgtaggtggccgctttggcaatacgttccagctccctggcctgctcggcgtcggttttggcatcggcatagcagccggtgtggatttcgatatagggcgcgccaacgtccgccgccgctttgatctgcgcttcatccgcatcgataaacagggagaccaggatgccggcatccgccaggcgttgacaggcatcgcgcatcttgtcgcgctggccggcgacgtccagcccgccttcggtggtcacttcctgacgcttctccggcaccaggcagcagaagtgcggtttggtttcgcaggcgatcgtcagcatctcttcggtgaccgccatttcaagattcatgcgggtgtgcagcgtctggcgcaggatacgcacatcgcgatcggtaatatggcgacggtcttcgcgcagatgcacggtaatgccgtcggcgccggcctgttcggcaatgaaagccgcctgaaccggatccgggtaagcggtgccgcgggcgttacgcaaggtcgcgatatggtcaatattgacccctaacaataattcagccatgacaatcctcgttaatcattattcgtattatcggctcgcgcctttcgcgcgggcataaactggcgaaacaactcccggctcttgagcggtttgccgccgagatagggcttcagggcgatacgggtaaagcgcttcgcggcgcgcagcgtatcaacatcaggaaactcgcgactcgccaatgctttcaaatggtgcccggtaaacgtgttgttatcaatcaccaggctggcaataaagcctttttcttcacgatagcggtaggtcatggtgtcgtctaccggctcgccgctcccggcgcagtggagaaaatccacgccataccccaggtgcccgagcagcgccagctcaaaacgccgcagcgcgggctccggcgagccgctggccccggcgagcgcctgaatgcagtgcaggtagtcgaaaaagagttcggagaagcgtgtttcgtgctccagcacgcgggagataagctcgttaacgtagagaccgctgtagagggtgatgccgctgagcggcagcgccagcgaaacggcttccgcgctgcgcagggttttgacttcgccgcgaccgccgaagcgaaccagcaagggggtaaagggctgtaaagcgcctttgagattagagcgtttggagcgtgcgcccttggcaaccaggcgcacacgaccggattcttccgtgaagacgtccagcatcaggctggtttcgctccacggacggctatgcaggacaaaggcgcgctgccatccatccacgttgcgttaactcagaggtcgtcaacgtaaccgagactgcgcagggcgcgctcgtcatcggcccagccggatttcactttcacccacagctcgaggtgcaccggcgcttcaaacatctcctgcatgtccttacgcgcttcgataccgatggttttaattttggcgcctttgttgccaatcaccatctttttctgcccttcgcgctcgacgaggatcaggccgttgatatcgtaaccgccgcgctcgttgctgacgaaacgttcgatttccacggtgacggagtacggcagctcagcgccgaggaaacgcatcagtttttcacggatgatttcggaggccataaagcgttgtgagcgatcggtaatataatcttccgggaagtgatggatcgcttccggcagatgcttacgcacgatcgccgcgatggtatcaacgttggtgccggtttccgctgagatcggtacgatatcgaggaaattcatctggctggcgaggaactgcaggtgcggtaacagatccgctttttcctgcacgttatccaccttgttgaccgcgaggatcaccggcgctttcgcgtcgcgcagcttgttgagcaccatctcgtcgtcctgcgtccagcgagtgccttccaccacgaagatgaccagttccacgtcgccaatcgaactgctggccgctttgttcattaagcggttaatggcacgcttctcttccatatgcaggcccggagtatcaacgtaaatcgcctgatacggcccttcggtatggataccgacgatgcggtgacgggtggtctgcgctttacgggaggtgatcgagatcttctgcccaagcagcttattcaacagcgtggatttgccaacgtttggacgacccacgatggcgacaaacccacaataacttttttcttcgctcattccagctccagctttttcagcgcctgttcggcggcagcctgctccgccttacgacggctggaacctgtgccaaccaccggttcactcaggccactgacctggcagtggatagtaaattcctgatcgtgcgcttcgccgcgaacctggaccaccaggtaagacggcagcggcagatgacgtccctgcagatactcctgcagacgcgtcttcggatccttttgcttatcgcccggactgatttcgtccagacgggtctggtaccaggagaggattaagcgttcaacgttctgaatatcactgtcgaggaaaaccccgccaattaacgcttcaacggtatccgcgagaatcgattcgcgacggaaaccgccgcttttcagctctcccggcccgaggcgcagacactcgcccagctcaaactcgcgggcgatctccgccagcgtgttgccacgcaccagcgtcgcgcgcatacggctcatatcgccttcatcgacacgaggaaagcgatgatacagcgcattcgcgatcacgaaacttaaaatggagtcacctaaaaattccaggcgctcattatgtttgctgctggcactgcggtgagttaatgcctgttgcaacagctcctgatgatgaaaagtgtagcccagctttcgttgaagccgattaattacgatggggttcatgcgttaccaataaatgaatgcgtcaaagatgcagcacacgaaaccgacctgagcattcgcttcaaacagtaatttgaaacagaccaatacgctttcgtgtgcagtgtcacccggcagagcgacaaccaaaaacttcggggggatattctatacgcaacgacacgggatgtcgttagtttgaatggatttaaatactaaataattcacgccgctgcgataacagcagcgacgtgaattcagcagaggaaattaatgaattccaccaatgcgcgataaccgcacgccggtcggccattcaccttcctgcttttcaaaactcatccagatagcggttgcttttccgaccaggttggcttccggcacaaagccccagtaccggctgtcggcgctgttatcccggttgtcgcccatcatgaagtactgaccgggcggcacaatccaggtggccagcggcagaccggactgatggtagtacatcccaacctgatcctgggcaatcggcaccatcagaattcggtgcgtcacgtcgcccaatgtctcctgacgctcggtaagacgaatgccgtcggctttggtttcgcccttcggcaactgccagaaaccgctgctcgcttcgccgccgttgctgcgggagaaggtctgaacaaaatcgctcggctccacgttggaataggtcaccggcagcgcgttgccgcaggcctgtccggaactgcagcccggctgaatagtgacctgtttggcaaccggatcgtaggtgaccttatcacccggtaaccccaccgcgcgcttaatgtagtccagacgcgggtcttccggatatttaaataccacgatgtcgccgcgcttcggatggccggtctcgatcagcgttttctggtagataggatctttaatgccgtaggcaaatttctccaccagaataaaatcgccgatgagcagcgttggcatcatcgaacctgaagggatctggaaaggctcataaataaatgaacgtaccaccagaacgatcgccagcaccgggaaaaccgatgcgccggtttccagccagcccggtttcgggccgactttcttcagcgtcttcttgtccagttgctcgccggtcgctgcctgagcagcggcctgacgttcacgacgtttcggtgcaaaaatgaacttgtccaggcaccataaaacgcccgtcaccagggttgcaatcaccaggatcagggcaaacatgttcgccatgccaactccttagggttatttgccgtctttaccaacgtgcagaatggcgaggaacgcttcctgcggcagctcaacgttaccgacctgcttcatacgcttcttaccttctttctgcttctgcagcagctttttcttacggctgacgtcgccgccgtagcatttcgccaggacgtttttacgcagctgtttcaccgtagagcgcgcgataatgtggttaccgatggccgcctgaatcgcgatatcgaactgctgacgcggaatcagatctttcatcttttccaccagctcgcggccgcgatacggcgcgttatcgttgtgggtgatcagcgccagcgcatcgacgcgttcaccgttgatcagcacatcgacgcgaaccatgttcgacgcctggaagcgtttgaagttgtagtccagcgacgcatagccgcgggaggtggacttcaggcggtcgaagaagtcgagaaccacttccgccatcggaatttcataggtcagcgccacctgtttaccgtggtaaaccatgttggtctgcaccccacgcttctcgacacacaaggtaatcacgttgccgaggaactcctgcggcagcagcatgtgacactcggcgatcggctcgcgcagctcctgaatattattcagcggcggcagcttggacgggctgtcgacgtagataacttctttggaggtggtctctacttcgtagactaccgttggcgcggtggtgatcaggtcgagatcgtattcacgctccagacgctcctgaatgatctccatgtgcagcaggccgaggaagccgcagcggaagccgaagcccagcgcggtagagctttccggctcgtagaacagagaggcatcgttaaggctcagtttgcccagcgcgtcgcggaaagcttcataatcatcggagctcaccgggaacaggccggcatacacctgcggtttcaccttcttaaagccaggcagcgctttgtctgccgggttgcgggcggcggtcagggtatcgcccaccggcgcgccgaggatgtctttgatcgcgcagaccagccagcctacctcgccgcatttcagctcggtacggtcaacctgtttcggggtgaagatgcccagacgatcagcgttatagacctggccggtgctcatgaccttgatcttgtcgcccttgcgcatggtgccgtttttaatccgcaccagcgacaccacgccgaggtagttatcgaaccaggagtcgataatcagcgcctgcagcggcgcgtccggatcgccttccggcggtgggatatcgcgcaccagacgctccagcacgtcggtcacgccgacgccggttttcgctgagcagcgcaccgcgtcgtgggcgtcgatcccgacgatatcttcaatctcgtccgctacgcgctcagggtcggccgcaggcaggtcgatcttgttgagtaccggaaccacttcgagatccatctccatggcggtgtagcagttggccagggtctgggcttctaccccctgcccggcgtctaccaccagcagcgcgccttcgcacgcggcaagagaacgggaaacttcataagagaagtccacgtggcccggggtgtcgataaagttcagctggtaggtctcaccgtcgctggccttatagtccagggtgacgctctgcgccttgatggtgatcccgcgttcgcgctcaagatccatggagtccagaacctgggcttccatttcacgatcagaaaggccaccgcaaatctggatgatacggtcagacagcgtcgacttaccgtggtcgatgtgagcgatgatcgaaaagttacgtatattcttcatatttagagttaattatgccttacgagtatcatgaggccgctgtactgtgcctgacgttttttaatccgaaaacgccgcattctacactacatccgcgaaaccaggaaatgctgttagatccagcatacccgcagaaattgtggcgttgtaacaggaaaggtaaataaagataagggccagtgaaatcactggcccatgtcggaggaaggcgtatcaacacgcagcagatccggcggcagtgcgacgttcaaaatcaccggctgccaggactgacgtgccgccagtcgcggcgacagaccgcgcgccaccaggaagccgccgacgccgcccagcagcgcgccgcaaagtgacgcaatatcgctggcaaacagcacctgaaaaatagacgccattacaaacagccccgccagcggcgccatatacaccagcatcgctgagcccagcaggctgctttcagcgatccccagctccactttttgccccgcggccaacggctgctcgcagggcacgctaatggtatggctggtctgcggccccagcttgtttagcacccggctaccacagccggcacgggaggcgcagctgctgcaggaggctttaacgtcgcagtgcacctgcgccacgccgttatgccaggaaaccacggtagcccactctttaatcattgtactgccttgaatttaatactgtcagagatacgcttcgccgtctgcggcggcagctcacccactacggttatctccgcgttatcgcgcaccgtcgtgctgacggtgcgtcggccggtgcgcaacagctggtcgctgctggccgccgtggcgcggttgatattgatcgagaagctgaacaagccgtcggaatagagacgtgattctaccggaccgtcaaaggtgggaagacggcgctggctgctggaaacctcagtcacgccttgcgggagccacgtcggcgcccagttgaagttggctttgtcgcctccttcaggcaccgacagctgcggcggcaaattcgcttttgccagcgtctccatgctggcgctgacgttatcgccaacgttgaaggagacgacccggaactgctccagcgtttccccgtcgcggtcgagcaaatcgacgcgcagcggcagcttggtttcagcatccagccaggcgataaagctgtagcgcgtgccgtcgcgagccacgacgcggatcacgtcgcagaggcggtcagcgatacgggtacggcccacggagataaaatcatacgccgcggagaggcgtttgaaatcgctatataccagcgatggcagcgaatcgacgatatagtcgccgttcagggtgaacggatcgagaccgggttcaaaatagctgatttccgtgccgcgcaggaccacttcccggcgcggaccgtccagctgcagcaactgcgccagcggttggttgttcagtcgcgcgtgacgatagcgcagcgactcaacgccttgtttgctgatgctaacaaaagacagctcataattgagagactggctggccaggttcatctgctgcaacaacgccccggacgatgtatcagccgaggcgttgacagagaacaacaggctgcctgccatgagcgacatggcacaccaaagttgcttcattactgcgattgtgttcctaaagtttgatagcccggtacctggactgcggcctgctgagtctgggcctggccaaactgaagctgctcagcgtgcaggcggcgctgcagttcgtagtcctgcagcatggcgttaattcggcggcgctgttcctggacctgcgcctgctggccgcttcccgctgacgcgtcagccggcacgccaagacttaccgggcttgctttacccatcatgggcagcgtattgaacaccggcgcttctggctgctgagcggaatcagactgaccattatagtgctggacgccgacgataaccgcaagcgatacacaggcggcaacgcccatttgagtcagggagctggcccatggacgcaccttgttccagaacggcatctgccgccactgatgcggcgcgggctgagattcaggaataagcggcgccgtctgacgaacgggctcattttcaatggcggccatcacccgggcggagatatcaaattgcagcacctcagcggtatcgccacgcagcgtatcgcggataaggtgataactctcccaggttttttgcatctcagaagaacgactcagctcgttgagcagttcgttatccagcgtttcaccatccattaaagccgaaagtttttctttctgcatgcctgatacccttttccagtattccgctatcgtcaacgcctgataagcggttgaactttattatcaatagcttctcgcgcccggaagatacgcgaacgcaccgtcccaaccggacaatccatgatagcggctatctcttcatagctcaggccatccagctcccgtaacgtaattgccatgcgtaaatcttccgggagcgattcaatggtacgaaaaactatttgtctcagttcttctgacaacattaagttctcagggttcgaaatttctttcaacgccccgccgctttcgaagttttccgcctcgttggcgtcaacatcgctggacggcggacggcgcccctgagcaaccagataattcttcgccgtgttgacggcgatacggtataaccaggtgtaaaaagcgctatctccccggaaagagtccagcgcacgccatgccttaacgaacgattcctgaacaacgtcagcgatatcgcccggcggtacatagcgggaaaccaggctcgcgaccttatgctgatagcgcactaccagcaaattaaacgctttctgatctcctttctggacccgttcaacaaggacctgatccgttaactgctcgctcatccgaggtaatgtctccccaaacccaattcccatgcgtcttcaaaacaccacccaaaatctgcattatgagcaagctgactgttggagtgcatgaaaacaataaagttccgttacgctttttgttttttgtctggcaacggcggcagatcgttatcaatcattatatgcccaggttgctaaacgataggtaagtcaataagaaaaagcgcaggcccgtctgaagggtatcgtaacacgccgtttatttcactataaaatccaatgccatcaaccttccccgcgtctcattttcagcgcgcaagacgccgtttccgttcgccttttgtttagccgtcacaacagcagacaaaaaaattgtacgattcctcacggaccggtgctattgtgagctaaatgtgtttagtaaattaaacaaagacaatgaataccactcctgacttctcttgtgatgtgttgattatcggcagcggcgctgccggtctttcccttgccctgcgcctggctgagcacagttcggtgaccgtgctgagtaaagggccgatcagcgaaggttcgacgttctacgcccagggtgggattgccgccgtcttcgatgagacggacagtattgaatcccatgtcgaagataccctcatcgccggcgcggggctctgcgatcgtcatgcggtcaccttcgtcgccagcaacgcccgatcatgcgtccagtggcttatcgatcagggagtgctgtttgacacccaggtccaggccaatggcgaagagagctatcatctcacgcgcgaaggggggcacagccatcggcgcattcttcacgccgccgacgccaccggcaaagcggtagagacgacgctggtcgataaagcgcttgcccatcctaatatccgcatccttgagcgcagcaatgccgtcgatttaatcgtatcggataagattggcctgccgggcacccgccgggtggtcggggcatggatctggaatcgtaataaagagcgggtggaaacctgcagcgcgaaagccgtagtactcgctaccggcggggccgcgaaggtttatcaatataccactaaccccgacgtctcttccggagacgggattgcgatggcctggcgggcgggatgtcgggtggcgaatctggagtttaaccagttccaccccaccgcgctatatcacccccaggcgcgtaatttcctgcttactgaagcgctgcgcggcgaaggcgcccaccttaaacgcccggatggcacccgctttatgccggactttgacgagcgcggcgagctggccccgcgcgatatcgtcgcccgcgccatcgaccatgaaatgaagcgcctgggcgtagactgtatgttccttgatatcagccataaacccgaggcgtttgttcgccagcatttcccgatgatttatgaaaagctgctcggcctgggaattgatttaaccaaagagccggtgccggtcgtccccgccgcgcattacacctgcggcggcgtgatggtggatgataatggccgcaccgacgtcgatggtttatacgccatcggcgaagttagctacaccgggctgcacggcgcgaatcgtatggcgtcgaactcgttgctggagtgcctggtctatggctggtccgccgcggaggatattgcccggcgcctgccgctcgcccagaaggtcgccacgctgccagcatgggatgaaagtcaggtggagatcccggatgaactggtggttatccagcacaactggcacgaactgcgcctgctgatgtgggattacgtggggattgtgcgcaccacccgcaggctggagcgcgccctgcggcgcattaccatgctccagcaggagctggatgagtattacgcccgcttccgcgtctcgaataatttgctggaactgcgcaatctggtgcaggtggcggagcttatcgtacgctgcgcgatgttgcgtaaggagagccgcggtctgcattataccctcgactatccgcagccgctgcctgacagcggcccgtcgatactctcgcccctggctcacataaagagataaaagtcctcggtcagagcggtaaagccttccgaatattgctgctctggcccgcggatcgccagcctgtcgctgaaacactcccctgccgtcggggagaaagccagcagcacccgatgcggcggtcgcagctcggtctccgccacgtcagtacgcagtcgcagatgccagcccatcgcccttgcccgttcgatgaacgcattaccaatatccaccggcaacaccacgcaaaaaaaaccttcttcggtaatatgctctgcggcacaggtcagcagggaggcgtgatcgagcgtagtggtgtaccgcgcctgctctcgctgcgaggtcgcgcatggcacgccttcggcaaaaaagggcggattactgattatcagttcatagcgtcgagtttgcgacggctgccactgatgaatatcggcctgccagacctcaatccgcgaagcccacggcgacgcgagggcgttttcccgcgcctgagcggcggcctcttcgtccagttctaccgcctcgacatgcacatcatctccggtacgctgcgcgagcatcagcgccagcaagccgctgcccgcgccaatatccagcacatgcttcactccggcaatcggcgcccaggcgcccagcaaaatgccgtcggtacccaccttcatggcgcagcgatcgtgagcgacaaagaaccgtttgaaggtaaaaccattgcgcggcagcgcaaacttcgactgagacatcctcaataaccttgccgacaaaaactcctgaacctaaggctatgcacaataccggagaacagatagccttacaaacagatgaacattacgtcagtaacgtctataatcggcggcccactcagaggtagaacatgactgtaacgactttttccgaacttgaactcgacgaaaacctgctggaagccctccaggataaaggtttcactcgcccgacagccattcaggccgccgctattccgcctgcgctcgatggccgtgacattctcggttcagcgccgaccggcaccggtaaaacggcggcgtatctgctgccagcgttgcagcacctgctcgatttcccgcgtaagaaatccggcccgccgcgcattcttatcctgacgccgacccgtgagctggcgatgcaggtggccgaccacgcccgcgagctggcgaagcatacccatctggacatcgctaccattaccggcggcgtggcgtacatgaaccacgcggaagtgttcagcgaaaaccaggacatcgtagtcgccaccaccggtcgcctgctgcaatatattaaagaagagaatttcgactgccgcgccgtcgagaccctaatcctcgatgaagccgaccgcatgctggatatgggttttgcccaggatatcgaaaccatcgccggtgaaactcgctggcgcaagcagactatgctgttctccgcgacgctggaaggcgatgcgatcaaagactttgctgagcgtctgctggaggagccggttgaagtttccgccaatccgtcaacccgcgagcgtaagaaaatccatcagtggtactaccgcgccgacgatatcgaacataaaaccaaactgctggtgaatctgctgcaacagccggaagccacccgcgctatcgtgtttgtgcgtaagcgtgagcgcgtgcatgagctggctaactggctgcgtgaggccgggattaacacctgctggctggaaggcgagatggtgcaggccaagcgaaacgaagctatcaagcgcctgaccgacggccgcgtcaacgtgctgatcgccaccgacgtcgctgcccgcggtatcgatattccggacgtcagccacgtctttaacttcgatatgccgcgtaccgcggatacctacctgcaccgtatcggtcgtaccggccgcgccggtaaaaaagggaccgccatttctctggtcgaggctcatgaccacctgctgctgggtaagattggtcgctatattgaagagccgttgaaagccagagttatcgatgaactgcgcccgacgacccgtgcgccgagcgagaagctgacgggtaagccatcgaagaaagtgctggcgaagcgtgcgcagaagaaaaaagatgaaaaagagaaaccgcgggtgaagaagcgccaccgcgatacgaaaaatatcggtaagcgccggaagccaagcgcggccgggacgccatcagcgtccagcgatgagtaaaaaaaacgccgggatatcccggcgttttcacatctggcgttagccttacaggctttcggtaaaggtacgggcgattacgtcgcgctgctgttccggcgtcagagagttgaagcgtaccgcgtagccggaaacacgaatggtcagctgcggatatttttccggatgctcaaccgcgtccagcagggtttcgcgacgcagcacgttaacgttcaggtgctgaccgccttcgacgcgcacttccggtttcacgtccaccgggatttcacggtattcgatttcacccagtttgcttaccgcaaccacatcatcttccgcaaaaccacctttggcgcacaggcagcgcgcttcgcctttttcgctatccagcagccagaaagagttgagcaggtcgtcgtttgccgctttagtaatttggataccagtaatcatttgatgcctcccaggcagtgtttattcgattttggcctcttcgcggccaattggtaaaaccattgttgtatgagtgtatatatatcagccgcaccctcggcattccttgatataaatcaataaaagccactcacccaacgtgggtataggaggtttttattgttttacatcaagttacgccattgtgagctataaataattttgtaaattttcaattttttttgcataaaagccggcatcaggccgtgccgattttgttctatagaaagaagccgttaagctatagcgatgacccttttgcaggagagcaagatgaccacccctttaacctggcatgacgtgctggcggatgaaaagcaacaaccctattttctcaatactctgaagaccgtcgccgaagagcgccagtcggggatcaccatctatccaccgcaaaaagacgtcttcaatgcgtttcgctttactgaactgggcgatgtcaaagtcgtcattctcggccaggacccctatcacggcccgggtcaggcccatggtctggcgttctcagttcgtccgggcgtcgcgatcccgccttcgttgctgaatatgtataaagagctggaggccacgatccccggctttacccgccccacccacggttatctcgaaagctgggcacgacagggcgtgctgctgctgaatacggtcctgaccgtccgcgccggacaggcgcactcgcacgccagtctgggctgggagacctttaccgataaggttatcgctttaatcaatgagcattgcgagggagtagtttttctgctgtggggctcccatgcgcagaagaaaggcgcgattatcgatcgtcagcgccactgcgtgctgaaggcgccgcatccatcaccgctctctgcgcatcgcggcttctttggctgcaaccatttcgtacagaccaaccagtggctggttgaccgcggcgaaacgccgatcgactggatgccggtccttcccgctgaaagcgagtgattgacagccataaaaaaagccagcatcagctggcttttttgcattcaggcaggcgaatcacgccttgttctgacgccaccattccgccagcaggacgccggtcgccacagagacgttcaggctttcaacgttgccggtaccgtcgatggcaacgctgagatcggcgctggaaatcgccgcatcggacagaccatcacgttcctggcctaacgccagcaccattttcttcggcagctcggctttaaacagcggggtaccattatggctggacgttgagacaatcgcgtagcccgctttgcggaactgatcgagggtatcgataaagctgtcgccggtgatcggttcaacatgctccgcaccgccctccgccgtacggatcgccgccccggactccagcacgccggcatcctgaaccaccacgcccttcacgccaaagtgcgcgcagctgcgcatgatcgccccgagattatgtgggttacccacatcttccagcgccagaacgcaatcttcttccccggccttcgcgacccattgagcaacagaagtgccgtggcgttttttgatcaggaagcagacgccgccgtggtgctcggtgccggaggctttcgccagctcggcttcgtccaccacgtgataggccttacggttggccgccatccagcgcagcgcctctttaaagcgcggcgtcacgctctgaataaaccaggcgcgaacgatagcttccggacggctctggaacagcgcctggcaggcgttttcgccatatacgcgggtctcttccgcacgctgacgacgcagcacttccggatcgataaagctcttcccgctgatcccgccgtgatcttcttttaccggcgtctcatcgccaggagcgcgggaaacggtacgccacggagacgcatcgtcgcgatgaaaatcatcgcgtttgcgatcgtcacgcttacggtcgtcacgtttgcgatcgtcgccgcggctgtttcgttcgtcacgcgcagggcggctgcggccgtcaacacgagattttcctggacgacctccccctttcccggtacgtgggttatgggtgcgtttgtcagaatcatcatcactgcggacatacatcactttgaccttgccgcttttatttttcagttcgtcgctcatcatttttctccacctgcgctgcgcgaagcgcgcagattacccgatgtgccatcgcttcgccatgatttcgtttaaaagccggcctctattgcactcatcgaacaaaacgcattgtcctcaaataacacttcatcgataatatgtaacatcacagaaacatatcggccacgtgccacgttgcaacccataaccagaggttagttatgaataccgtttgtgccagttgtcaggctctgaaccgcctcccggacgatcgtagcgcggatggcgcaaagtgcggacgctgcggtcacgatctttttgacggcgacgtcatcaacgcgaccggggcaacgctggataaactcttgaaggacgatctgccggtcgttgtcgatttctgggcgccatggtgcggaccctgccgtagcttcgcgccgatctttgaagacgtcgcggaagagcgtagcgggaagatgcgttttgtgaaagtcaacaccgaagcggaacgtgagcttagcgcccggtttcgtatccgcagcatcccgaccattatgatgttcaaaaatggcgaagtgatcgacatgctcaatggcgcagtgccaaaagcgccattcgatagctggcttaacgaagccggccaacaataacccttccggggcaccgcttgtgccccgttttcacctctgcgacaatagcgtttttcactagcgactcccatgactgataacgctgtccttcgcctgcgcgccgaacgtctcgcgcgagctacccgccctttccttgcgcgcggcaatcgcatccgccgctgccagcgctgtctgctgccgctcaagcagtgcctgtgcgccacgttaacctcagcgcaggccgccagccgcttctgcctggtgatgtttgatacggaaccgatgaagcccagcaacactggccggctcatcgccgatattctgccagataccgaagcgtttcagtggtcgcgtaccgaaccgccgcaggcgctgctcgatctggtcgcccatcctgattatcagcccatggtcgtatttccggcctcctatgccgggccggatcgccaggtcctgagcgcgccgccgtccggtaaaccgccgctgtttatcatgctcgacggcacctggaccgaagcgcgcaaaatgttccgtaagagtccttatctcgacgcgctgccgattatctccgtcgatctgtcgcgcatctctgcctaccatctgcgcgaggcgcacgccgacggacaatattgtaccgcggaagtggccatcgccctgctggatctggcgggcgatgccccggccgccgctgcgcttggcgagcacttcacccgcttccggacccgctatctggcgggaaaaacccagcataagggcagtatcacagcgggccaggtggaaaacgtttaaaatcattcggtcactgggatgaaaggagaccggtatgagccaacgaggcctggaagcgctgctgcgaccaaagtccatcgccgttattggcgcatcaatgaagccgcagcgcgctggctatctcatgatgcgcaacctgttagccggcggcttcaatggcccggtgatgccggtcacccccgcctggaaggcggttcttggggtactggcatggcctaccatcgagagcctgccgtttaccccggatctggcggtgctctgtactaacgccaggcgtaatctcgaattgctcgaagccttagggcaaaaaggctgcaagacctgcatcatcctctcttcgcagccggaacagtacccggcgctgctcgaatgcgccgcgcgctatcagatgcgtctgctcggccccaacagtctcggactgctggccccatggcaagggctgaacgccagcttttcaccggtgccgatccatcgcggtaaactggcctttatctcgcagtcggccgccgtctccaatactatccttgactgggcgcaacagcgcgagatgggtttttcctacttcatcgccctgggcgatagcctggatattgatgtcgatgacctgctggactttctggcccgcgacagcaagaccagcgccattttgctgtacctcgagcatctcagcgacgcgcgccgctttgtctccgccgcgcgcagcgcttcgcgaaacaaacctatcctggtgattaaaagcggccgtagtccggcggcgcagaagctattgcacgccaattccgggatggacccggcatgggatgcggccattcagcgcgctggtctgctgcgggtgcaggatacccatgagctgttctctgcggtggaaacgctcagccacatgcgcccgctgcgcggtgaaaaactgatgatcgtcagcaacggtgcggcgccggcggcgctggcgctggatgagctttggttgcgaaacggtaagctggcggctctcagcgaggagacgcgcgacgccctgcgccaggcgttgccggttggcgtggagatcgccaacccgctggatctacgcgatgacgccagtagcgaacactatcagcgggcggtgaatgttttgctcaacagtcaggactatgacgcgctgctggtgatccactctcccagcgccgccgcgccgggcaccgagagtgccctggccctgattgacgctctgaagcatcacccgcgcggtaaatatgtcaccgtactgaccaactggtgcggcgaattttcctctcaggaagcgcgacgtttattcagcgatgccggcctccctacctaccgtacgccggagggcacgatcaccgcttttatgcatatggtggaataccgtcgcaaccagaaacaactgcgcgagacgccggtgctaccagactccttaaccgccaataccagcgaggcgcatgctctgctgcagcaagcgatagaagacggcgccaccacgctggatactcacgaggtcagcccggtgcttcgggcctatggcatccacacgctgccaacctggattgccgctgacagcgcggaagcggtgcatatcgctgagcagataggctatccggttgcgctgaagctgcgttctccggatatcccgcacaaatcagaagtacagggggtcatgctctatttgcgtaccgccgccgaggtgcagcaggctgcagatgcgatgatcgatcgcgtcaaactggcctggccccaggcgcgcatccatggattgctggtgcaaagcatggccaatcgcgctggcgcccaggagctaagagtagtggttgagcacgatcccgtcttcggcccgttgattatgctgggcgagggcggcgtggagtggcgggccgaggaccaggccgccgtggcgctgccgccgctgaatatgaacctggcgcgttatctggtgatccaggcgatcaaaaataagaagatccgcggccgcagcgccttgcgcccgctggatatcgctggcttaagccagctgctggttcaggtctcgaacctgatcgtcgactgcccggagatccagcgcctggatattcatcccctgctcgcctccggcaacgagtttacggcgctggacgttaccctggggcttgctcccttcagcggcgacagtgaaagccgtctcgctattcgtccctatccgcaccaactggaggagtgggtggtgatgaaaaatggcgatcgctgtctgttccggccgatcctcccggaagatgagccacagttgctcgcatttatcgcccaggtcaccaaagaagatctctattatcgctattttagtgagatcaacgaatttacccatgacgacttagccaatatgacccagatcgactacgatcgagaaatggcgttcgttgccgtcaggaccagcgcagagaagagcgagatcctcggcgtgacgcgggcgatctccgatcccgataatattgacgccgagtttgccgttctggtccgttcagatttaaaagggttaggcctggggcgaaggttgctggaaaagctgatcgcctatacgcaaagccatggcctgcggcgccttaatggtattacgatgccaaataaccgaggcatgataggcctcgccagaaagctgggattcaccgtcgatattcagctggaagatgggattgtcagcctgtcgctgcccctgaatcagggataatcgcgcgacgctgaccgcaattgttgaccacattagcgggtagtaatggtattattgcccgcttacgtcgtctgcatggtacagaagacccttcaataaacagagaagaaacgcactgtgatgttgtcaaaatttaagcgtaataaacatcaacaacaccttgcccaactccctaagctttctcagtcagttgatgatgtagagttcttttacgcccctgcggaattcagggaagcgttactgacccggattgcccacgccactcagcgtatatgcattattgcgctctatctggagcaagatgatggcggaaaaggaattttgcaggccctttatgacgccaaacgccagcgtccggaactggatgtccgcgttctggtggactggcaccgcgctcagcgtggccgtatcggcgccgccgcctctaataccaatgccgactggtattgtcggatggccaatgaaaatccaggggtagatatccccgtttacggcgtgccgattaacactcgggaggcgctcggcgttctccatttcaaaggctttattattgatgactgcgtcctctacagcggcgccagcctgaatgatgtttatctgcatcagcatgataagtatcgctatgatcgctatcagtgcatccgtaacggcaaaatggcggacatcatgttcgactgggtcgacaacaatctggttcaggggcgcggcgttaaccgtctcgacagaccggatcggccaaaaagcccggaaatcaaaaacgacattcgccagtaccgtcaggagctccgcgaccgcagctaccattttgtcggcaccgctggtgacgaagaactctccgtcaccccgctggtaggcctgggtaaatcgagcctgctgaataaaaccatctttcacctgatgccctgtgccgaacacaagctgacgatctgcaccccctacttcaacctccctgccgtactggtaagaaatatcatccagctgctgcgcgatggaaaacaggtggagattattgtcggcgataaaacggctaacgatttctacattcctgaagatcagccgtttaaaatcatcggcgcccttccctatctgtatgagatcaacctgcggcgtttcctcagccggctgcagtattatgtcaataccgatcagctgatcgtccgcctgtggaaggatgatgataacagctaccacctgaaaggcatgtgggttgacgatgagtggatgctgctcactggcaacaacctgaacccgcgcgcctggcggctcgatctggaaaacgccattctgatccacgatccaaagcggcagttgggggccatgcgggagaaagagctgaagctcatccgcacccacaccacggtagtgaaacattatcgggatctgcaaagtatcgccgactatccggtgaaagtgcgaaaactgatccgccgcctgcggcggatccgcattgaccggctgatcagccgtattctctgactatcagccccgcctcgacggggcttttttctggaagcgctatgcgtacgataatagtgattgcttcgctgctgttaaccggctgcagccacatggcaaatgatgcatggtccggtcaggacaaagcccagcattttctggcctcagcgatgctctctgccgctggcaatgaatatgcgcaacatcagggttacagccgggaccgcagcgccgctatcggcctgatgttttccgtcagccttggcgcctcaaaagagctttgggacagccgcccggctgggagcggctggagctggaaggattttgcctgggatgtcgccggcgcgaccaccggctacgctgtatggcagttggctcatcagtaagcgttacagacgcaaccccttccctttgcgatgcaacatcagggagacaaggaaggcaatggcggccatcaccgtcacataccagtagaacgcgtgctctatccctgccgacttaagcgacagcgcgacgtactccgcagagccgccgaacaatgcgttcgcgacggcataggacaacccgaccccaagcgcgcgaacctgagccgggaacatctctgctttcaggatgccgctgatcgaggtatagaaactgacaatcagtaaggcgcagatcaccaggccgaaggcggcatagggtgagctcactttttgcaaggcgctgagaataggcacggtaaataacgtcgccagcacgccaaagcacagcatggaggtccggcggccaactttatccgagaaggcgccgaatagcggctgaaccagcatataaacgaacagcgccgcggtcatgatcacgctggcggtgctggccgtcatgcccgccgtgttgaccagatacttttgcatataggtggtgaaggtgtagaaggtcagcgatccggcggcggtaaagcctaacaccatcgcaaaggcccggcgattgcgccacaaccctttaaatgagccagcctctttcagcgcccgggtctcctgcttcgaggtttcgtccagctggcgacgcagccacagcgcgacgatagccagtaccgccccgagggcaaaaggaatacgccatccccaggcatggagatcttcatcgctaagcacctgctggagcgccacaaccactaatacagccagcagttgaccaccaatcagcgtaacgtactggaaggaggcatagaagcctttctttccctccaccgcgacttcactcatataggtcgcactggtgccgtattctccgccaacagacagcccctggaacagacgcgccagcagcagcagcgccggggcccaggtgccgatcaccgcataacccggcagacaggcaatcaccagtgagccaaagcacatcatgcagaccgagataagcatggacgttttacgtccccggcggtcagcgatccgaccaaacagccatccaccgataggacgcatcagaaatccggcggcaaatacgcctgccgtttgcagcagttgggtggtggtatttccggatggaaagaagatgtgcgcgaaatagagcgagcagaatgagtaaacgtaaaaatcaaaccattcaaccagattccccgaggaagcgccaacaattgcccaaatacgacgacgggtatcggccagttccggcgcgccccgttcggtaatgctactttctgtcattgttatattgctccagcaaagactgcaatctgtcttgtcgggcgtaccacgtcacgcagacaaattaattagtaaactaaatgttatataattgttatatttttatatgtgattggattcacattttttttcgcaagcacggttttcgcgatcatcgccagcgcaggggcagggaaaaagtggattatggcgaagggattgccatgacggggttttattttgcgttgaaaggagataatggagcgaacatggcgtaattttcgccggaggcggtgctgcgcactttgtccggggtacggttttgtagccccggtaagcgcagcgccaccggggaggcataccggcacgctggccggacgacagaaacgcaaaaagcccatccggcaggatgggctcttcacttgtttgatgcctggcagttccctactctcacatggggagaccccacactaccatcggcgctacggcgtttcacttctgagttcggcatggggtcaggtgggaccaccgcgctagtgccgccaggcaaattctgttttatcaacacgtcttaccaacgtatcgattaatctgtatcagagctgaaaattctctcaatccgccaaaacatcttcggcgttgtaaggttaagcctcacggttcattagtaccggttagctcaacgcatcgctgcgcttacacacccggcctatcaacgtcgtcgtcttcaacgttccttcaggagacttaaagtctcagggagaactcatctcggggcaagtttcgtgcttagatgctttcagcacttatctcttccgcatttagctaccgggcagtgccattggcatgacaacccgaacaccagtgatgcgtccactccggtcctctcgtactaggagcagcccccctcaattctccagcgcccacggcagatagggaccgaactgtctcacgacgttctaaacccagctcgcgtaccactttaaatggcgaacagccatacccttgggacctacttcagccccaggatgtgatgagccgacatcgaggtgccaaacaccgccgtcgatatgaactcttgggcggtatcagcctgttatccccggagtaccttttatccgttgagcgatggcccttccattcagaaccaccggatcactatgacctgctttcgcacctgctcgcgccgtcacgctcgcagtcaagctagcttatgccattgcactaacctcctgatgtccgaccaggattagctaaccttcgtgctcctccgttacgctttgggaggagaccgccccagtcaaactacccaccagacactgtccgcaaccccggtcaggggccaacgttagaacatcaaacattaaagggtggtatttcaaggttggctccacgcagactggcgtccacgcttcaaagcctcccacctatcctacacatcaaggctcaatgttcagtgtcaagctatagtaaaggttcacggggtctttccgtcttgccgcgggtacactgcatcttcacagcgagttcaatttcactgagtctcgggtggagacagcctggccatcattacgccattcgtgcaggtcggaacttacccgacaaggaatttcgctaccttaggaccgttatagttacggccgccgtttaccggggcttcgatcaagagcttctccttacggataaccccatcaattaaccttccggcaccgggcaggcgtcacaccgtatacgtccactttcgtgtttgcacagtgctgtgtttttaataaacagttgcagccagctggtatcttcgactggtctcagctccatccgcagggacttcacctacacaccagcgtgccttctcccgaagttacggcaccattttgcctagttccttcacccgagttctctcaagcgccttggtattctctacctgaccacctgtgtcggtttggggtacgatttgatgttacctgatgcttagaggcttttcctggaagcagggcatttgttacttcagcaccgtagtgcctcgtcatcacacctcagccttgattatccggatttgcctggacaaccagcctacatgcttaaaccgggacaaccgtcgcccggctaacatagccttctccgtccccccttcgcagtaacaccaagtacaggaatattaacctgtttcccatcgactacgcctttcggcctcgccttaggggtcgactcaccctgccccgattaacgttggacaggaacccttggtcttccggcgagcgggcttttcacccgctttatcgttacttatgtcagcattcgcacttctgatacctccagcatgcctcacagcacaccttcgcaggcttacagaacgctcccctacccaacaacacatagtgtcgctgccgcagcttcggtgcatggtttagccccgttacatcttccgcgcaggccgactcgaccagtgagctattacgctttctttaaatgatggctgcttctaagccaacatcctggctgtctgtgccttcccacatcgtttcccacttaaccatgactttgggaccttagctggcggtctgggttgtttccctcttcacgacggacgttagcacccgccgtgtgtctcccgtgataacattcttcggtattcgtagtttgcatcgggttggtaagtcgggatgaccccctagccgaaacagtgctctacccccgaagatgagttcacgaggcgctacctaaatagctttcggggagaaccagctatctcccggtttgattggcctttcacccccagccacaagtcatccgctaatttttcaacattagtcggttcggtcctccagttagtgttacccaaccttcaacctgcccatggctagatcaccgggtttcgggtctataccctgcaacttaacgcccagttaagactcggtttccctgcggctcccctatacggttaaccttgctacagaatataagtcgctgacccattatacaaaaggtacgcagtcacacccgaaggtgctcccactgcttgtacgtacacggtttcaggttctttttcactcccctcgccggggttcttttcgcctttccctcacggtactggttcactatcggtcagtcaggagtatttagccttggaggatggtccccccatattcagacaggataccacgtgtcccgccctactcttcgagttcacaacctgtgcattttggtgtacgggactatcaccctgtaccgtcggactttccagaccgttccactaacacacaagctgattcagactctgggctgctccccgttcgctcgccgctactgggggaatctcggttgatttcttttcctcggggtacttagatgtttcagttcccccggttcgcctcgttaacctatgtattcagttaacgatagtgcaacgaattgcactgggtttccccattcggacatcgccggctgtaacggttcatatcaccttaccgacgcttttcgcagattagcacgtccttcatcgcctctgactgccagggcatccaccgtgtacgcttagtcgcttaacctcacaacccgaagatgtttcacttctgattgcgaaaatttgagagactcgaacacacttaaacagtgtgtcgtttcaattttcagcttgatccagatttttaaagagcaaatatctcaaacgtcacccgaagatgagttttgagatagttcggcacgcgtctttcactcacgaaccagcaagtggcgtcccctaggggattcgaacccctgttaccgccgtgaaagggcggtgtcctgggcctctagacgaaggggacactgaagtctcaatcgcaagacgccttgcttctctactttcatcagacaatctgtgtgagcactacaaaggcaggttctttaaggtaaggaggtgatccaaccgcaggttcccctacggttaccttgttacgacttcaccccagtcatgaatcacaaagtggtaagcgccctcccgaaggttaagctacctacttcttttgcaacccactcccatggtgtgacgggcggtgtgtacaaggcccgggaacgtattcaccgtagcattctgatctacgattactagcgattccgacttcatggagtcgagttgcagactccaatccggactacgacatactttatgaggtccgcttgctctcgcgaggtcgcttctctttgtatatgccattgtagcacgtgtgtagccctggtcgtaagggccatgatgacttgacgtcatccccaccttcctccagtttatcactggcagtctcctttgagttcccggccgaaccgctggcaacaaaggataagggttgcgctcgttgcgggacttaacccaacatttcacaacacgagctgacgacagccatgcagcacctgtctcacagttcccgaaggcaccaaagcatctctgctaagttctgtggatgtcaagaccaggtaaggttcttcgcgttgcatcgaattaaaccacatgctccaccgcttgtgcgggcccccgtcaattcatttgagttttaaccttgcggccgtactccccaggcggtcgatttaacgcgttagctccggaagccacgcctcaagggcacaacctccaaatcgacatcgtttacggcgtggactaccagggtatctaatcctgtttgctccccacgctttcgcacctgagcgtcagtctttgtccagggggccgccttcgccaccggtattcctccagatctctacgcatttcaccgctacacctggaattctacccccctctacaagactctagcctgccagtttcgaatgcagttcccaggttgagcccggggatttcacatccgacttgacagaccgcctgcgtgcgctttacgcccagtaattccgattaacgcttgcaccctccgtattaccgcggctgctggcacggagttagccggtgcttcttctgcgggtaacgtcaatcgccaaggttattaaccttaacgccttcctccccgctgaaagtgctttacaacccgaaggccttcttcacacacgcggcatggctgcatcaggcttgcgcccattgtgcaatattccccactgctgcctcccgtaggagtctggaccgtgtctcagttccagtgtggctggtcatcctctcagaccagctagggatcgtcgcctaggtgagccgttaccccacctactagctaatcccatctgggcacatctgatggcatgaggcccgaaggtcccccactttggtcttgcgacgttatgcggtattagctaccgtttccagtagttatccccctccatcaggcagtttcccagacattactcacccgtccgccgctcgtcacccgagagcaagctctctgtgctaccgctcgacttgcatgtgttaggcctgccgccagcgttcaatctgagccatgatcaaactcttcaatttaagtttgatgctcaaagaattaaacttcgtaatgaattacgtgttcactcctgagacttggtattcatttttcgtccgaggacgttaagaatccatgtcactttgagtgcccacacagattgtctgataaattgttaaagagcagttgcgacgcgctttagcgctctgtcgcgaggtcccgtataatacgttttcctcattcagagtcaagcgcttattttgcttttctctgtcggctttcaacgtcgatttccgtcgctgaatcctcctggcccggcggcttgtttgccgttgttccgtgtcagtggaggcgcattatagggggtaattctgaagtgacaaggataaattcaaaaaaagaattcaaccgctcacttttcaaccaaatcaggtattgagttttaattcttgcctggtttttaaacaaaaacgagcccgctgggctcgtttttgtcgttttgtgatttactgcactgccacaatgcggtcgtcttttactaccagctcgatggttttacccggaaccagctcaccggaaaggatctgctgggctaacgggttctcaatctgctgctgaatagcacgtttcaatggccgcgcgccgtataccggatcgtaaccgttggcgctcagcagcttcagcgcctcatcggacatctgcacttcatatccgcgctcttccagacgtttatacagacgctgcagctggatctgggcaatagaggcaatatgtttctcgcccagcggatggaagaccaccacttcgtcgatacggttgatgaactccggacggaagttctggctgactacccccagcaccaggtccttcatatgtccgtagtccagctcgccgaaccgttcctgaatcagatcggaaccgaggttcgaggtcatgatgactaccgtattacggaagtcgaccgttctcccctgcccgtcggtgagacgcccgtcgtcgagtacctgcagcagaatgttgaacacatccgggtgcgctttttccacttcatccagcaggatgacggaataaggacgacggcgcaccgcctcggtcaggtaaccgccctcttcatagccgacgtatcccggaggcgcaccgaccagacgcgagacggaatgtttctccataaactcggacatatcgatacgcaccattgcgtcgtcgctgtcgaacataaagttagccagcgttttacacagctcggttttaccgaccccggttggaccgaggaacaggaacgaaccaatcggccggttcggatcggacagcccggcgcggctgcggcgaatggcgttggataccgcttcaaccgcctcatcctggccaatcacccgatgatgcagctcctgctccatacgcagcagtttgtcacgctcgctttccatcatgcgggagaccgggataccggtccagcgagccagcacttcggcgatttcagcatccgtcactttattacgcagcagacgcatggttttcccttcggactgagtggcagccgccagctgtttctccagttccggaattttgccatactgcagctcggacatccgcgccagatcgccgacgcggcgcgcctgttcgatggcgattttcgcctgctccagctcagctttgatggtctgggtgccggagagcgacgctttttccgctttccactcttcttccagcaccgagtactgccgttctttatccgccagctcctcgttgagcatatcgagacgcttcaggctcgcctcatcagactctttcttcagcgcctgctgttccagtttcagctggataatacgccgatcgagacggtccagctcttccggtttggagtcaatctgcatacggatgctggatgccgcctcatcgatgaggtcgatggctttatccggcagctgacggtcggcaatatagcgatgcgataaggtcgccgccgccacgatagccgggtcagtgatctgcacgtggtggtgcagctcataacgttctttcagaccgcgcagaatcgcgatggtatcttctaccgaaggctcggcaacgaacactttctggaagcgacgttccagcgcggcgtctttttcgatgtactgacggtattcatcaagcgtcgtcgccccgacgcagtgcagttcaccacgcgccagcgccggcttcagcatgttacccgcatccatcgcgccgtcggctttaccagcgccaaccatggtatgcagttcgtcgataaacagaatgacgttgccttcctgtttggacaggtcggtcagcacgcctttcagacgctcttcaaactcaccgcggtatttcgccccggccaccagcgcccccatatccagcgccaatacccgacggcctttcagcccttctggtacttcgccgttgacgatacgctgcgccaggccttcgacgattgccgttttacccaccccgggttcaccgatcagcaccgggttgtttttggtacgacgctgcagtacctgaatggtacggcgaatctcttcatcacggccgatcaccggatccagcttgccctgctcggctcgctcggtcagatcgacggtaaatttcttcaatgcctgacgttggtcttcggcaccctgatcgttcacgctttcacctccgcgcatttgttcaatcgcctgagtcacgttggcggttgttgctccggcggattttaaaaggtcggtcagcgtaccgcgcgattcaagcgccgccagaacgaacagttccgacgaaataaagttgtcctttttcttttgcgccagcttgtcgcaaaggttgaggatccgcactaaatcctgagaaggttgcacatcgccgccggtgccttccacctgcggtaaacggctcaaggcctgttcgatgtcagtgcgcagtttcccggcattcacgcccgccgaggttaataaaggacgtaccgatcccccttcctgattcagcaaggcgctcattaaatgaagaggttcgatgaattggttgtcgtgcccgagtgcgagcgactgggcatcggcaagagcaagctggaatttattggtaagacgatccagacgcataactcctcccataaacaggtcaaatttgctactggagattaaatgaggtcatccctcaattattcaaggttaaagacccgaactatgtgaaaaataagtttgccttctggatcgtcttgattctctaggttatatcagccaaatgaaacttgccatacgaccggtggtcttgtcgcgccggtaagagaaaaaatcatccttttcgcttagcgtgcagcgatcgccgccgaaaatcagctcaacgccgacgtttgccagacgctgccgcgccagttggtagatatcagcaaaatatttttcgcctgccggacgaaaagcccggtgcgcattctcgtccttcgccataaaggcatcccggacttccggtcccacctcaaacgcctgcggaccgatggcgggccccagccacgccataatattttcggctttatcggcgaaacgagcaatcgtcgcttccagaaccccttcgcataagccgcgccatcccgcgtgcgccgcggcgacttcggtgccatcgcggttacagaacagcaccggcaggcagtcagcggtcatcaccgcgcagacggtccctggcgtacgactataagaggcatccgcgcgtttcgacggatagggtccgccgtccagcgtcagaacctcggtgccatggacctgctccagccaaaccgggtaagacggcaagccgccggcggcaaacatccgccgccggttttcttcgacatcctgcagattgtcgccgcaatgggcgcccaggttgagcgagtcatagggcggcagactcacgccgccgatgcgggtagaactacaggccgccacgctgccgggcattggccactgcggtacaatcagtttcgtcataaccagtcaatatcgtccttatgggcttcaaaatcggcgcgcatcgcctcgatgagctcgaccatatcctgtgggatgggcgcgtgccactccatttcaatgccggagatcgggtgatacaggcgcagcatggtggcatgcagcgcctggcggtcgaatttacgcagcgcggtgatgaactcctccgacgcgcccttcggcggacgcggccggccgccatagacctggtcgcccaccagcggatgggtgatatgcgacatatgcacgcggatctgatgcgtacgaccggtttccagacgcagacgcaggcgggtatggatgcggaaatgttccataatgcggtagtgggtcaccgccggtttgcccatcggatgcaccgccatatgggtacgcttggtcgggtgacggctgatcggctcttccactgtgccaccggcggtcatatgaccgatcgccaccgcttcgtattcacgggtgatctcgcgcaactgcagcgactccaccagccgggtttgcgccggaatggttttcgccaccaccatcagaccggtggtgtctttatccagacgatgaacaatacccgcgcgcggcacatcggcaattggcggatagtagtgcagcagcgcattcagcacagtaccgtcagggttgcccgcgccaggatgtacaaccagatcgcgcggtttattgatcacgatgatgtcatcatcttcgtaaacgatattgagcggaatatcctgcggctggaagcgcgcctcttcttcgatttccacatcgatagcgatgcgttctccccccagcactttttctttcggtttatcgccaatggtgccattgactaatacgcgttggtcgaggatccattcttttatccgcgatcgcgaataatcagggaacaattcggccaaagcctgatctaagcgttgaccgagttgattttcggtcaccgttgcggtgagttgtactcgttgtgccatatacagcttcttcgtttaacgttgggttttacggctttgccgtttaatatagtgtgctattgtagctggtcttaatcgggagcaggaacagagattctcccgcataaacattttgaggaagtcaaaacgtcatgacgcgcatgaaatacctggtggcagccgccacactgagcctggctttggtgggttgctccggctctaaggaagaggtgcctgataatccgccgaatgaaatctacgcgaccgcccagcaaaaactgcaggacggtaactggaaacaggcgataacgcaactggaagcgttggataatcgttatccattcggcccttattcccaacaggtacagctggatctgatttatgcgtattataaaaacgccgatcttcctctggctcaggcggctatcgatcgcttcatgcgtttgaaccccacccatccgaacatcgactatgtcatctatatgcgcggcctgaccaacatggccctggatgacagcgcgctgcagggcttcttcggcgttgatcgctccgaccgcgatccgcagcacgcgcgcgatgccttcaatgacttctccaaactggtgcgtggttatccgaacagccagtacgccactgacgcctataaacgcatggtgttcctgaaagatcgtctggccaaatatgagctgtcggtcgtggattactacaccgatcgtggcgcatgggttgccgtggttaaccgtgtggaagggatgatgcgtaattatccggatacccaggccacccgcgatgccctgccgaagatggaaaacgcctatcgtcagatgcaaatgaacgctcaggcggacaaagtcgcgaagattatcgccgcgaacagcaagaacacctgagcctgactcatcgatcgcaaacggcagccactggctgccgtttttttatacgtttcccgacgagctgaagcggtttagcgccgggttaactcatcaaatatggcctgctttatcgggttcgacaagtaaaatctcacttcttcctgccctgtctcacaaaatgaatttgttgacaaaaagtgacaataaaatgtgatttatatcacacattttgacattgggaaaggtatgctggattcaccaagacgggaaagacaagaggtaaaatttatgacaatgaacattaccagtaaacaaatggaaattactccggcaatccgccagcatgtcgcagaccgtctcgccaaactggataagtggcaaactcatttaatcaacccgcacatcattctgtctaaggagccgcagggttttatcgctgatgcaaccatcaacacgccaaacggccatctggttgccagtgcgcgtcatgaagatatgtacgccgccattaacgaattgatcaacaagctggaacggcagctcaataaagtgcaacacaaaggggaagcccgccgcgccgcgacgtcggtgaaagaggcaggctttgtggaagaagaagagtaatccttaacttaagttgtgtcatgccacgcgccttcgggcgcgttttttattgacagagtgaaaacagtacaggtactgtaatccccactacctaaaggaatttaccatgaaacttgtcccgttcttcttcgcattcttttttaccttcccctgaccgggaggcaattcgtcgtataagaaagaatgcgaagacgaacaataaggcctcccacccgggaggccttttttatttgataacaacaaaggcaacatctatgaccgaggaaaacccattactggcgctgcgcgataagataagcgccctggacgagaagctgcttgctctgctggcggagcgccgcggactggctgttgaggttggaaaagccaaactggcctcccatcgtccggtgcgtgatattgaccgcgaacgcgatctgctggagcgcctgatgactatcggcaagcgccataatctggatgcgcactatatcacccgcctgttccagctgattatcgaagactctgttcttacccagcaaaccctgctgcagcagcatctgaataaaattaacccgcattcggcccgcgtggcgttcctcggtcccaagggctcttactcgcatctggcggcgcgtcagtacgccgctcgccactttgagcagtttattgagagcggctgcgcgaagttcgccgatatttttaatcaggtagaaaccggccaggccgattacgcggtggtgccgattgaaaacaccagctccggcgggatcaacgacgtctacgatctgctgcagcacaccagcctgtcgatcgttggcgagctgacgatccctatcgatcattgcgtactggtgagcacctcgacggatgccgataaaattcagaccgtttacagccatccgcagccgttccagcagtgcagccagtacctgagccgctacccgcactggaagattgagtataccgagagcacctcggcggcaatggaaaaagtggcgcaggcgaactccccggccgtcgcggccctgggtagcgaagcgggcggcgctctgtatggtctgcaggtgctggagcactgccaggccaaccagacgcagaacatcacgcgcttcctcgtcctggcgcgcaaagcggtgaacgtctccgaccaggtgccggccaagaccacgctgttaatggcgaccggtcagcaggcgggcgccctggtggaagccctgctggtgctgcgcaaccacaatctgatcatgaccaaactggaatcccgcccgatccacggcaatccctgggaagagatgttttatctcgatattcaggccaacctggattcgctgcccatgcgcaaggcgctgaaggagctggcggatatcacccgctccatgaaggtcctcggctgctaccctagcgaaaacgtggtcccggtggatccggtttaacattcgcggaacggtaatttcttcatccctgccaccgctaccggcagggtgaagatggcgcctgacagcggatactgcgccagctcatcgtcctccatgttttcccgggtggtggtgatatagagcgttttcatatccgccccgccgaagcagaccatcgtcgggcaacgaaccggcatcgggtaggatcccagctcctcgccctgcggcgagaaacgggcgatccgccagccgtcgaacattgcgctccagtaacatccctccacgtcgatcgccgccccgtcagggatcccttcgccaggctgaaaacggcgaaagacttcgcgtcggccaggctcaccctgctcatccagcggcgtacggtagatcacggcgttcggcgtatcagaggtatacatccagcgccggtcggcgctaaaggccaggccattggcgccatggatgtcacactggatcactttcggctgcaggtcgttatccactcgcatcagcagcgcgccgttgtaatccccaggcccccagaaggtaccggcataaaagcgcccatcgcgatcggtcccgccgtcgttaaaccgcgccagctccgggttgctcgggttatcgcagactttccgccgcagcaggccgtgggcgtcggtcagccagatgccgctgcgcaatgcaacgataaacccgcccttctcgcgcagggcaaaacagccgacctcctctggaaactgcagcacctggtgttctccgctgcggatatcgtagcggtgaatttcacattccatgatatcagcccagtagagggcctgttctgcctcgctccaggtcgggcattccggcaggtatccggtgtagtcaaacagcggttgtggttcagccatcgttgtcatccctataaaaaaagccagcggtcgctggctttattgtatacatctttttcgctttactgccgattatcgttcgcctgacgcagcagcgtgcggctctcgctctggaaacgctgagcgtaatcgccaaaccagtgttcgactttacggaagctgtcgataaacgcctgcttatcgccctgctccagcaggccgatcgcttcgccgaaacgctggtagtagcgcttaatcagcgccaggttgttttccgatgacataataatatcggcgtacagctgcggatcctgggcaaacagacggcctaccatcgccagctccagtcggtaaatgggtgacgagagcgccagcagttgctcaagacgtacattctcttccgccaggtgcaggccataggcgaaggtggcaaagtggcgcagcgcctgaataaaggccatgttctgatcgtgctcaacggcgctgatgcggtgcagccgcgcgccccaaacctggatttgttcgaggaaccactgataggcctccggctggcggccatcacaatagaccaccacctgcttcgccaggctgccgctgtccggaccgaacatcgggtgcaggccaagaaccgggccctgatgcgccgccagcatcgcctgcagcggctccgctttcaccgaggcaaggtcaaccagaatgcaatccgccggaaggggcggcagcctgccgatcgtctccacggtggtgtgaatcggtacgctgacgataaccatgccggcatcggcgacgatatccgccgcccgggcccaatcgtttttttccagaatacgcacctggtagccggacagcgttaacatcttctcaaacagacgccccatctgcccaccgccgccgacgatcaccaccggccgcagattcggctgcagggttttgaagcctttgtcgttttcgctggaataggattcccgcatcacgcgacgcagaacgtcctcgatcagatccggtggtacgccgagcgcagccgcctcttcacgtcgggaggcgagcatcgccgactcgcgctccgggacgtaaatcggcaggccatactggctcttcacctcgccgacttcggccaccagctccagacgcttagccagcaggctaagcaacgctttatccacttcatcaatttgatcgcgtaacgcggtcagttcagcaaccatactttcctcttaaaccaaacgggccgccaggtggccgcggagatccttatccagttcacgcagcagcgcctcggtagtctcccagctgatgcaggcatccgtcaccgagacgccgtatttcatcgcctcacgcggctgttcagaggactgattgccttcgtggatattactttcgatcatcaggccgataatggagcggttgccatctttgatctgcgcgaccacggattcagccacggccggctggcggcggaaatctttattggagttcccatgactgcaatctaccatcagcgacggcttcagtcccgcctgcgccatctctttttcgcatttcgccacatcttccggaccgtagttcggcgctttgccgccgcggaggatcacatggccgttcggattaccctgcgtttgcagcaggcagacctgcccggcctggttgatgcctacgaaacggtgcggcatcgccgcggcgcgcatggcgttgatggccgtggccaggctaccgtcggtaccgtttttaaagccgaccggcatcgacaggccagaggccatttcgcggtgcgtttgtgattccgtggtacgcgcgccgatagcggaccagctgaacagatccccgaggtactgcgggctgttgggatccagcgcttccgtcgccagcggcagtcccatattgacgagctcgaccagcagacgacgcgcaatcttcaggccgccttcaacatcaaacgaaccatccatgtgcggatcgttaatcagccccttccatccgacggtggtacggggtttttcaaaatagacgcgcatcaccaggtagaggctatcgctgacctctgcggcaagggctttaaaccgacgagcatattcaatcgcagcttccggatcgtgaatggagcaaggaccacataccaccagcaggcgcggatcgcgaccggcgatgatatccgaaatggtctgacgggcgtgcgcgatctgcgcttcctgctcgacgctcagcgggaattccgccttcagttgctccggggtcattaatacatgttcgtcggtaatatgtacgttgttcagcgcgtctttttgcatgattgcgatcctgtgtagctcgtttgcgataagggttgcctcagagggcatgacgtaacgataccacacaaagtaaagaattcaatccatattccgtaaattttaatttacaccaacgaattaattgccactcacaatggcgcgatgcgtataacaatatttacacatagaaaaaacaagccaaacttgcgcacccacggtatcggtactacgaaaaatcctggtgagaattgtcccaaagcaaagggcgcatctaatgacgggttttattaacagtggtattcttcgccgggcatcggcagcggcttttcccgcgctatggcgactttgacggaagcgttaatgacagtattacaccgtcttttattgactgtattttttctcatcgcggtatctcctgtttttgctgccggaccttcagaacatgttcgcgctattgtttccgggatcgtgacctacacccgttggccgtcattaacaggagcgccaaagctgtgcatttttgcctcatcacgcttcacccatagcctggctcatgaagatccggatgcattaccctatcaaccggtgatagtacgtaatcgtgaagaagcgttaaaaacgacctgcgatggtttttattttggcagcgaatcgccgactgaacagtcagaactcactcgccgctatggcccgaggccgctgttactcatcgcagaacaaaatacggattgttcaattggtagcgcgttttgcctgatcatcaatgacgaccgggtccgcttctccgttaatctggacgttctgacgcacagcggggttcgggttaacccggacgtcctgatgcttgcccggaagaaaccacatgaataaggacttttcacagactccgcgcccgactttcaaacgcgcgctccgtcgcattagcgtgataagcgtggtgatttccatgacgctggtctggctgctgctgagtacagcctcaatcttcacgctcaagcagtacgcgcagaaaaatcttgagctcactgccgcgaccatggggcgcagcctcgaagccgccctggtgtttggcgacagcgcggcggcagaggagaccctcgcgtcgttgggcaagcaagggcagatctcccaggcaatcgtgctaaacggccagatgcagcacttcgccgcgtggcgccatgaaccgctggccaataaagagcaagtgagcgggcttatcagtaaatggctgtttccggagcccacggtgcagcccatctggcaccagggcaaacaaatcggcgagctgagattgaccgcgcttgatgaactgattagccactttctcggtatctcgattctggtgctgaccggcagcattctgctcgcctcgttcatcgccctgctgctgacccactccctacaccgggggatcgtcgccgccctgcagagcatcactgaggtcgtgcatgatatacgtgaaaaccgccacttctcccggcgggtgccggaggagcgtatcgaggagttccatcttttcgcccaggactttaacagcctgctgggggaaatggaggactggcagcgccagctgcaggccaaaaacgcgcagctgttgcgcagttcgttacacgatccgttgaccggcctggctaaccgcgccgcctttcgtaacgcgctcgccgagctgatgcagaatgaagtcgatcatcaaacctcggcattgctgtttcttgatggcgataatttcaaactgattaacgacaactgggggcatgcggcgggcgataaagtgctgatggaggtcgccagccgcctgatgacttttgccggtaaacgccatctggcgtggcgtcttggcggcgatgagtttgccgttctgctgcgcgaggtgcgctcggaagcagaagtgcaggccctgtgccaggcgctaacggaacaatttcttccgccattcaacctgcacaacggtcatagcgccacgctctcgctgagcgtcggttatgccctggcgtgggagcacgccaccgcggaatcactgcaagaacttgccgatcagaatatgtatcggatgaaaaaccaacgtatccagcagacgctgaaataataaaggactcattatgatcagaaaatatttcgtccccgccctgatggcggcggcgcttttgacaggttgccaggctcctcagggaaaatttacccccgagcaggtggcggcgatgaaatcttacggctttactgaaagcaatggcgattggtccctgggcttatccgatagcatcctgtttgacaagaatgactaccgactacgtcccgacagccgccagcagatcaccacgatggcctcgcggctggcggctaccgggatcacccatagccgccttgaaggccataccgataattatggtgaagatagctacaatgaagccctgtcgcttaagcgggccaacagcgtggccgatgcctgggcggaaggcgctcatgtcccacgcagtaatttagtcacccgcggccttggcaaaaaatacccgatcgccagcaacgacacggcggccgggcgcgccgaaaaccgccgggtaacggtggtcatcagcacgccgtaagtcttcacttagtcgctggacttcatcatcctcattgccgttgccgcgcgccagcgcaggtagtcaacggcaatgaacagcagcaggctggctcccattaacggcatggccaatccaagggtaaacgccagcccaagcaccaggcttcgggcaggccaggcgagcgacagccacgcctgcagcagcgaacgcgccggatcccaggccgcctgaggcggacggcggatccaccataaccggtaccccaccccgatggtaacgcacagcgcgcagccaaatcccaccagcagcagctgattcgccagaccaaagaggatccccatatggaaatcgacgccccagcgggtgagcttcgccatcagcggaaagtcggcaaaacgcgtgcgatccaccacctgcatcgtggcgccatcgatcgccaccgcgtccacctgcgtcggccagcgacggtcgatctcattcaccgtccaggcgcggtcgtctgacactggcggacggatctccagccggctggcgttcagccccgcctgacgggccgccgccagcgcctggtcaaactgggccagctgcagcgccggctgatgctgggccatggccatcgcatccatatgatgtccggcgtggggatcgtgcgtcatctgcatctcgccatgcagctgggtattgacctgcggcgtcagccagccgaacgctgcccgcattttgtccacattgccgccggcccattgcgaccaggtcaggccggtggcggagaagagcagcatacccaccagtaagccccagcccagcgtcacgtgcagccgacgatggttctgcagggcgttattcagccgccgttttggacgcgtcatcgcccacagggcaatgcctccgagcgcggccacccacatccaggaggcggccagttcgctgtataacctcccgctgtcgcccagcagcagagagcgatgcgcataatcaatccactggcgcagcggcaggatgccgctggtgccgtagaccgtcatatcgcccttcacccgcagcgcgatcggatcgacaaaaatagcccgggattccgactctccgagacccggatcggcaaacataatgcgcgtggtctcgcccaacgcaggcgccggacgcaccgccagcagccgcagattgccctgggtcgcttcttcggccaccgcaatctgggcgctgagcggctgcggagtcccctcggcaaggccatgcagcgcgtcgtgatagagccagttttccagctgcggcgtcgccacgtacaacgtaccggtcagggcagcgacaaagataaacggtccgataaacagaccaatatagaaatggaggcgacgcagcaggttcagccatgccgcgcgcgaggtgcaggttgtcatacttttccttttttaaagcaaaagaggtcgttgcgcggtgcgcagattgatttttattaaagggaaaaagcagacagccgcggcggggcgcgggtttcggggtagagccagggaaagtagtgccagtgctttaataccgggcgagaaaccggcaggcgaatgcgccgcaggagcatggcgacgaacagcgccagcgcgaaaaggagccccgggacatgggctaacagcacgcaatagccacacgcttcggcatggtccagcggcatttcgtgtccggtatgcgtagcgccgtctgtgctgtgcatcattgccatcttgtgcccgggcatctgcgccatgctcgcggacgagctatccatcatcatggcgtggtgcatgccgggcatggcgctcatggggtctttttgcagggagacggagatcaggggggccaccaggatcagcaggatcgccaacagcgccagccaggcggctcgccgtttaggtgtcgtttgctgaaaactgttactgaccaccgcccctccgtatagagggcgtattgtaaatgatttacatcacgatggttacaacaaagataaaaaaagggccggccctgaggccagccctttttgtcaggatgtcgcgaaagcgaatcttagttaagacgctctttgatacgagcagacttaccagtgcgctcacgcaggtagtacagtttagctttacgtacagcaccacgacgtttaacagcaatgctgtcaactaccggagagtgagtctggaagacacgctcaacgccttcgccgttggaaattttgcgaacagtgaatgcagagtgcagaccgcggttacgaatagcgataaccacgccctcgaatgcctgcagacgttttttggaaccttcaacaacccatactttcacttccacggtatcacccggacggaaggaaggtacgtcctgcttcatctgttcttgttcaagttgcttaataatgttgctcataatttaatctcttatcctgggtaaactgatattgggggctcacgcctgcccatcatgtttatgctgctgttgcgcgtgttcagttttgaactccgacagcagctttgcttgctcttcagtcagagccaggttttccagaagttcaggtcttctaagccaggtgcggcccagcgactgcttcagacgccagcgacgtatctcagcatggtttcccgacagcaatactggcggtacttccatctcctctaacacttcaggacgggtatagtgggggcaatccagcaacccatcagcaaaggaatcttccgttgccgatgcttcatggcccagtactcccggaatgaaccgggaaacggagtcaatcagcgtcattgccggtaactcaccaccgctgagaacgtaatcgccgattgaccattcttcgtcaatttcggtttggattacgcgctcgtctatcccttcgtagcgaccgcacaccagaatcagtttctgattcgttgccagttcgctgacgcccgcttgatcaagcttgcgtccctgaggtgacagataaatcaccttcgcgccttcacctgccgcggcttttgctgcatgaatggcatcccgtaagggttgcaccatcattagcatccccggtccgccgccgtaaggacgatcgtccacggtacggtgccggtcatgcgtgaagtcgcgaggactccagctttcgatgctcagcaggccattttttactgcccggccagttaccccgtaatcggtaattgcgcggaacatttcaggaaacaggctaattatgccaatccacatagcgccgtcttttaccgtttatccggagaatttaaaaaccaggatcccaatctacttcgatagtacgcgtagtgagatcgactttcttgataacctgcccatcgaggaacggaaccaaccgctccttgataccaaatgcatctttcaggtttgccttgatgacgagcacgtcattcgacccggtttccatcatatcgatgactttaccgaggctatagccttccgtcgtaactacctggcagcccatcaggtctttccagtagtagtcaccctcttccagctccggcaactgcgatgaatccacgataatttcgcaattagtcagtagattcgcggcatcacgatcgtcaacgcctttcagcttgatgatgatgtcctgattgtggtggcgccagctttccagctcaacgacctgccactgacccgccttctggattaaccagggctgatagtcaaaaatgctttcggcgtcttcggtggaggaaaacactctgagccaaccacggataccgtaggaagaacccattttccccaatacgatcggatcaacaggtgcttgcgcggtgtgttgcttgctcatcatgaccaccgtgacagattaagctgctttgttagcggctttgatcagcgcggcaacgcgatcggaaacagtagcgccctggccaacccagtgagcgatacgatccagatccaggcgagtttcttcttccgcaccgttagcgatcgggttgaagaaaccaacgcgctcgatgaagcgaccgttgcgtgcattacggctgtcggtgacaacaacctggtagaacggacgctttttagcgccgtgacgtgctaaacgaatagttaccataacatcctcttgtgtgaataaaacaaccgggccccatcgaggaacggagcccggtgtcatattaaaagcccgaaaattttactgatttctggggaaaatgcaatcagcagttgataagtctgctgtaaaaggccgtcggcggtgcagccagtttagtaccagcgtgtgcgcaaccactgtaacgtacaggtagtacgtgaggatggcgagcacaccccggcgctaaaatggcaaacaagataaccttatgcccttgtttttaacgacccgggaagcctggcggcatcatccctttcatcccgcgcatcatcttcatcatgccgcctttcgacttcatcttcttcatcatgcgctgcatgtcgtcgaactgcttgagcagacggttcacatcctgcacctgcatgccgcagccggcggcgatacggcgcttacgcgaacctttgatgatttccggcttagcgcgctctttcagggtcatcgagttgatgatcgcttccatacgcaccagcactttgtcgtccatctgcgctttcacgttgtccgggatctgccccatgcccggcagcttgcccatcaggctggccatgccgcccatgtttttcatctggcgcagctgctcaaggaagtcggtgaggtcgaaaccgtcgcctttcttcagcttggaggccagcttctcggcctgcgcgcggtcaaccttgctctcgatatcttcgatcagcgacagcacgtcgcccatgccgaggatacgggaagcgacgcggtccggatggaacggctccagcgcttcggttttctcgccgacgccgaggaatttaatcggcttgccggtaatatggcgaatcgacagcgccgcgccgccgcgggcgtcgccgtccactttagtcagcaccacgccggtcagcggcagcgcttcgttaaaggccttcgcggtattcgccgcatcctgaccggtcatcgcatcgacgacgaacagggtttcaaccgggttaatggcggcgtggacgtgcttgatttcgtccatcatcgcttcgtcaacgtgcagacgaccggcggtatccaccagcagcacgtcgtagaatttgagtttcgcttctttcagcgccgcgttgacgatatcaaccggcttctgcccaacatcagacgggaagaaatcgacgccgacctgctcggccagggtttccagctgtttgatcgccgccgggcggtaaacgtccgcggaaacgaccagcactttcttcttgtgcttctcgcgcaggaatttccccagcttaccgacgctggtggttttaccagcaccttgcaggccagccatcagcaccacggccggcggctgcgcggccaggtcgagcgtctggttctcttcgcccatcgccgccaccagctcgttgcggacgattttgacgaactcctgacccggggtcaggcttttattgacttcatggccgaccgcgctctctttgacgcggctgatgaaatcacggaccaccggaagcgcaacgtccgcttccagcagcgccatgcgcacttcgcgcagggtgtctttaatattgtcttctgtaaggcgtccgcggccgctaatgttgcgcagcgtacgcgacaaacgatcggttaaattatcaaacattgtctctcgcctgaggtggaaacggtcggtcgccgcagcgacacacaaaacgaatgtggcggagtataacacgacatcaatctgaatgtgctgcaacggttggagcagaggcctgctaacgttatactgcttctctttcttatttagccaacagccgacacctatgcctgtttttgctctactcgcccttgtcgcctactccgtcagcctcgcgctgattatccccggcttgctgcaaaaaaacagcagctggcggcgaatggcgattttatctgcgactatcgccttaatctgccatgcttttgcgctggaagcacggatattccccggcggcgagagcgggcaaaatctcagcttactgaacgtcgggtcgctggtcagcctgatgatctgtacggtgatgactatcgtggcctcgcgcaatcgcggctggctgctgctgcctatcgtctatgccttcgcgctgatcaacctggccttcgccacattcgtgcctaacgaatatatcacccacctggaaaccaccccggggatgctggtgcatatcggcctgtcgctcttctcgtacgccacgctgatcattgccgcgctgtatgcgttgcagctggcgtggatcgactaccagctcaagaataaaaagctggccttcagcagcgaaatgccgccgctgatgagcattgagcgcaaaatgttccacatcacccaggtcggcgtggtgctgctgaccctgacgctgtgcagcggcctgttctacatgcacaatctgttcagcagcgaaaatatcgataaagcggtgctgtcgattattgcgtggttcgtctatatcgtcctgctgtgggggcactatcatgaagggtggcgcggacgtcgtgtggtctggttcagcgtcgctggcgccggtctgctgacgctggcctattttggtagccgcgtgctgcagcagttcgtgagctaagtcttttaaggaatcctacgtggaacatatctccaccaccacgctgatcataacgctgatcgtcatggtgattatctctgcctatttctccggttccgaaaccggcatgatgacgctgaaccgctaccggttgcgccacatggcgaaacaaggcaaccgccccgccaagcgcgtggagaagctgctgcgcaagccggaccgcctgattagccttgtgctgatcggcaataaccttgtcaacattctcgcctcggcgctgggcaccatcgtcggcatgcgcctgtacggcgacgccggcgtcgcgatcgccaccggcgtacttacctttgtggtgctggtatttgccgaagtgctgccgaagaccatcgccgccctctatccggaaaaggtcgcctaccccagcagcttcctgttggcgcccctgcaggtgctgatgatgccgctggtgtggctgctgaataccatcacccgcatactgatgcgcatgatgggcatccgcaccgataccgtcatcagcagcgccctgagcaaagatgaactgcgcacgattgtgaatgaatcccgttcacaaatctcacgacgcaatcaggatatgctgctgtcggtgctggacctggagaaggtcagcgttaacgacatcatggtgccgcgcaatgagattgtcggcatcgacatcaatgatgactggaaatctatcgtccgccagctgacccactccccgcatggccgcatcgtgctctaccgcgattcgctggacgatgccatcagcatgctgcgcgttcgcgaagcctaccgtctgatgacggagaagaaagagttcacaaaagagatcatgctgcgggcggcagatgagatctactttgtgccggaaggcacgccgctcagcacccagctggtgaaatttcagcgcaataaaaagaaagtcggtctggtggtcgatgaatacggcgatattcaggggctggtcaccgtcgaagatattcttgaagagattgtcggcgacttcaccacctccatgtcacccaccctggcggaggaagtgaccccgcttaacgacggcacggtgattatcgacggcagcgccaacgttcgcgaaatcaacaaagcgtttaactggcacctgccggaagatgaagcgcgcaccgtcaacggtattatcctcgaagcgctggaagagatcccggtcccgggcacccgcgtgcgcattgagcagtacgatatagatatcctcgacgtgcaggacaacatgatcaaacaggtgaaagtgatgccggtgaaatcattacgcgagagcgtcgcggagtagcgcgagcgaaggaattaatatcacggtgggctgcggcccgccgtttttttatctcgcgccagcagcgatgacacaaaaaacggccgcccgcaggcagccgttgagcaaggcagcaagcgttatttcgctttcgctaccgtcaccatcgcggcgcgaatagtacggccgttcagggtataacctttctgcatcacggccagcacgttgcccgccgccacatcttcagactcgaccatcgcaatggcctggtggacgttcggatccagcggaacgttggtgtcggcgatcacttccacgccgaacttacgcactacgtccagcatagatttcagggtcagttcgatcccctccaccatcggcgccagctccgggttagccttgtcagccacttccagcgcgcggtccaggctgtcgatcaccggcagcagttcattgacgaatttttccagcgcgaatttgtgcgctttctcgatatcctgctcggtacgacgacgcaggttatcttcgtcggctttggcacgcagcatcacttcacgttcacgtttctgcgcttcagccagctgggcttccagattcgcaattttttcatcgcgcggatccacctgctcagccgaaacttcaggctctaccgcctcaacgtcgtcgtgctgctccgtgataatttcttccggggcttgcccctcaggcgttttctgttctttactactcatgaatttctccgcgtttttttcgcattcatctcgctaacttcgcttattatggggatcagtttccgggtttcaagggaagcggacagattgtcactatttcatttaacgcaaggacatccagatcatgaagaaccatttcaagtgtatcggcattgtgggacatcctcgtcaccccaccgccctgaccacacatgaaatgctctggcgctggctgtgcagcaaagggtatgaagtgctggttgaacagcagatcgcccatgaacttcagctcagcaacgtgaaaaccggcacgctggcggagattggccaacaggccgatctcgcggtggtggtgggcggcgacggcaatatgctcggcgcggcgcggaccctggcccgttacgacattaacgtcatcggcattaaccgcggcaacctcggctttctcaccgaccttgacccggacaacgccctgcagcagctcgccgacgtgctggaaggccactacatcgccgagaaacgctttctgctggaggcccaggtgtgtcagcaggattgccagaaacgtatcagcaccgccatcaacgaagtggtgctgcaccccggcaaagtggcgcatatgattgagttcgaagtctatatcgacgaagtctttgcgttctctcagcgatccgatggcctgattatctccactccgaccggctccaccgcctattcgctgtcggccggcggcccaatccttacgccgtcgctggacgccatcaccctggtgccgatgttcccgcacaccctttcagcgcgaccgctggtgatcaacggcgacagcaccatccgcctgcgcttctctcaccgctgcagcgatctggagatcagctgcgacagccagattgccctgccgatccaggatggcgaagatgtcctcattcgccgctgtgattatcacctcaatctgattcaccctaaagattacagctatttcaatacattaagcaccaagctcggctggtcgaaaaaattgttctgattttcacggctgcctctttactggataaaaaaccagtctatactgtacgaaaacacagtattggtttttcatacaggaaggcagctatgttggcgcaactcaccatcagtaattttgctatcgttcgtgaactggaaattgatttccacagcggcatgaccgccatcaccggggaaaccggcgccgggaaatccattgccatcgacgcgctggggctgtgcctcggcggcagagcggaagccgacatggtgcgtcgcggcgccacccgtgccgacctgtgcgcgcgcttcgcgctgaaagatacccctgccgcccagcgctggctggaagagaatcagctggagagcgggcgtgagtgtttacttcgccgggtgatcagcgccgacggccgctcgcgcggcttcatcaacggcaccgccgtcccgctctcgcagctgcgcgagctgggccagctgctgatccagatccacggccagcatgcccaccagctgctgaccaaacccgaacaccaaaaaacgctgctcgacggctataccggtgagtatgcgcttactcagcgtatggccgagcactatcgccagtggcaccagagctgccgcgagttggcccagcatcagcagcagagccaggagcgcgccgcccgcgccgatctgctgcagtatcagcttaaagagctgaacgaatttaacccgctgccgggagaattcgagcagattgacgaagagtacaagcgcctggccaacagcggccagctgctcagcacctgccagcacgcccttacggtactggcggacggcgaagaggccaatctgcagagccagctttataccgcgaagcagctggtcagcgagctggtgggcatggacagcaagctttccggcgtcctggatatgctggaagaggcggccattcagctcagcgaggccagcgacgagttgcgccactaccatgaccgtctggatctcgatccgaaccgtctgtttgaacttgagcaacggatttcccgacaaatcgcgctggcgcgtaaacatcaggtgatgccggaagagctgccggcggtttatcaggcgatgctggaagagcagcgcctgctggacgacagcgccggctcgctggaatccctcagccagcaggtggtcgaacatcatcagctggcgctggagaccgcacgccagctgcatgccctgcgccaggccagcgccgacgagctgacccagcttatcaccgaaagtatgcactcactttcgatgccgcacggggtcttcgcgattgaggtcgcgttcgatgaacgccatctcaccgccgacggcgccgaccatattgagttccgcgtcaccactaaccccggtcagccgctgcagccaatcgccaaagtggcctccggcggcgaactgtcgcgcattgcgctggcgattcaagtgatcaccgcgcgtaaaatggaaaccccggcgctcatcttcgacgaagtggacgtcggcatcagcggcccgaccgccgccgtggtcggcaagctgctgcgccagctgggcgagtccacgcaggtgatgtgcgtgacccacctgccgcaggtcgcatgctgcggccaccatcatttctttgtctgcaaagagaccgatggcgagatgaccgaaacccatatgcagccgctggataaacgtgctcgcttgcaggagctggcccgtctgctgggcggcagcgaagtcacgcgcaacaccctggcgaacgcgaaagagttgcttgcggcgtaaactttttgattttcacagggtcatagtgaacagcaaattgcctgctgacctgcagccggaggtttccaacggcgcgaaggtctattattatcggcatattacagatgagccacgtactgctcgggcccaaaaaggaatcaaatcactatgcgctgtaaaacgctgactgctgccgcagcggttcttcttatgttgaccgcaggctgttccactctggaacgagtggtttaccgtcctgacatcaaccagggtaactatctggcaccaaacgatgtagcaaaaattcgtgtcggtatgacgcaacagcaggtagcttatgctctggggacgccaatgatgacggatccgttcggcaccaatacctggttctatgtcttccgtcaggagccgggccaccagaaagtgactcagcagaccctaaccctgaccttcaacagcggcggtgtgttgactaacattgataacaagcctgcgctgaccagtcagtaaggcccggaaaagcaaaaagcgctcgatgagcgcttttttatggctgatagtcggtctgctgcaggttactttgcggcgcttttctctgcccgctggcgacgcagctctttcgggtctgcgatcagcggacgatagatttccacccggtcgccgtcgtgaacttcgtcatgcagctttaccggacgactatagatacccagcttgtttttcgccagatcgatgtcatcacgcagcgccagcagaccgctggcgataatcgcctgctcgaccgtcgccccctcgtccagcgtgacccgctgcagatactgcttttcaggcagcgcgtaggcgacttcaacacgaatattagccggcactgtaaacctctttggcgcgcgaagtgaacgcctgcaccatgttagcggccagctctttgaagatccgaccaaaagccatctcaatcagtttattggtaaactcaaaatcgagatggaattctattttgcaggcctcggggctcagcggaataaacttccagccgccaatcagcttcttgaacgggccatccaccaggctcatcaaaatgctctggttgctggtcagtgtattgcgtgtggtgaaggtcttactgatgccggctttggacacatcaaccgccgccgtcatttgcgtcggcccgaattccagcacgcggctaccggtgcagcctggcagaaaatcaggataggacttcacatcgtttaccagttgatacatctgttccgcgctgaaaggcaccagcgcagtacggctaatctgaggcatagcaggttccacatttaaacacagtgcaaataatatcatttatctgctgctaaaaaaaacgctgtgccgcaactcgtgctaagatgcgcagtacacctcgcaggatgcgatcgaggtaactgtgtataagacgatgacttcaggacattatgactaagaaaaaagcccacaaacctggatcagccaccattgcgctgaataaacgcgcccgtcacgaatactttatcgaagatgaatacgaggctggtctcgccctgcagggctgggaagtcaaatccctgcgtgcaggcaaagccaacatcggcgatagctatgtcatcctgaaggatggcgaagccttcctgttcggcgccaactttacgcccatggccgtggcttccacccactatgtctgcgacccgacgcgcacccgtaagctgctgctcaaccagcgcgaactcgacacgctgtacggccgcattaaccgcgaaggttacaccgtcgtcgccctgtcgctgtactggaagaacgcctggtgcaaagtgaaaatcggcgtcgccaaaggtaagaaacagcacgacaagcgtaccgacctgaaagatcgtgaatgggcgctggataaggcgcgtattatgaagcacgccggacgttaatttcccctccccgagggccaactctcgctggcccttacgctatatccttgttgatgctgctttttcgtccatcctgctgaaataatcctgcgtgatggggctggtaacgacattcacaaatctgttatacttaacctacacattggggctgattctggattcgacgggatttgcgaaacccaaggtgcatgccgaggggcggttggcctcgtaaaaagccgcaaaaaatagtcgcaaacgacgaaaactacgctttagcagcttaataacctgctctgagccctctctccctagcttccgctcttaagacggggatcaaagagaggtcaaacccaaaagagatcgcgtggatgccctgcctggggttgaagcgttaaatctaatcaggctagtttgttagtggcgtgtctgtccgcagctggcaagcgaatgtaaagactgactaagcatgtagtgccgaggatgtaggaatttcggacgcgggttcaactcccgccagctccaccaaacattcattcatgatgcatcatgaaccttaaaaaagcctgtaacttcaacgagttgcaggcttttttgttgcatgtgtggtcatgatctctgtatgaatcttgagcattatgtatcttgttttgtaccgcgttgcctggacgctaaaaaaacaaggtgcaaaaacatgcctaaggtattgaaatccctaaccaataccgagatcgctgccgccaaaccgcagaagactgagtatatgctgcgcgatggcgacggactggcgttgttgattaagccatccggcagaaagatctggtacttcgaatacgctcccccggcgctgaaaaaacggaccaaaatcagcattggcccctacccggtagtcaccctcgccatggcgcgagatttcaggttgcaataccggcgtttacttgtgcagggcatcgacccgcaggcccatctggagcaggttgcagaggagcaacgactccagaatgaatgcacgctggaaaaagttgcggaacagtggctcaaagagaaaaaacggactagcgatcttagcgaagatcacgccaaagatgtctggcgctcgctggagatgcacgtcttcccctctttgggtaacacgcccgtcactgagatccgcccgaagatgctcaaggaacacctcacgctactggaagaacagggcatactggaaacgctgcggcgggtgatctcacggctcaatgaaatcttccgttttgccatctccgaagagctcatcgagttcaatccggctgacaacctggtcgcccgcttcaagaaaccgaaaaagcagaacatgcccgcccttcaccccagtgaactgggtaggctgatgctggccttacagaacgcttctatccgcaaggaaacccgctgccttatcgaatgggagctactgacctgggttcgccccggcgaagccgtcagcgcccgctggtgcgacatcgacatgaaaaaagcggaatggcgcatccccgacacctttatgaagatgaaccgttcgcacactgtgcctctcagcaaacaggcgctgcgcgttcttcagatcatggagcccgtcagccgccatcgtccgtgggtgttccccagcatccgcaaaccactggagcatatgcaccagcagaccgcgaacgccgcgcttattcgtatggggttcggcggtgagctggttgcccacggtatgcgcagtattgcccgaacggcgggagcaggtcatttcccccgtgaagttctggaatctgcgctggcacaccagaaagaagacgagatcgaagcggcctacaaccgcagcgactatctggaacaaaggcgaccgctgatgcagtggtggggaaactacgttgatgccgccagacggcaggcattgctcggtgaagaagaaccgctgcggatcgtggaaggagaataatgtgaccagtcccattcgtcagaatctgtttgaacgggaatgcgatatgccgctgctggaagcgcggcatctcgcccttctgcttctcggccttgatgcttcccaaccggcaaacgccctgccggaagaacatcaggagaattaccgtatcctacacgacgccatcagtcgcaccatcaaagccactggcatggtcagcgccccggcgaacaaacgcatgttctatgccgatgagatgttcgccctggcctggcggcttattgatgacgaactgacgccgccagaaattaaggcccgcagcctgaaggcggtgatgaaactgtcacgcaacagccgtggccgcaagtggctgaagacgctcggtgacgacgcgctaccagatctcactacttcagcacaaccttcccagcgtgggatgcataaacgcgacaaagcgcgggagaatactgccaggctctgctggctgctggttcagcttctggttgaggagactgacgggcgttatgggacgtctgataaaccggcttcggataggatacttcgaaagctgagagcgctagcgcaggagcgtgaattgccgtcagacgggcttgggcgagggacgttttatgaggtgttgaaaatgggacgagagaaggagaagtaggtatatacttcttgaacagggactgaaagttgaagaaggaaatcttaacttcttatactatgctgagattcacagaggaactttagaaatacttttctcttgtggggttcaacccatattagaagacatggatatcatcaaaaaattgaggggtagttgagtatggatccaatatcagttacaacagtatcaatttatgtcgcaacaaaatttattgatcagttcattgcagaagaaggttacggatggttaaaaaagaaattattccccaaaaacaactatgttaaccagctctatagaataattgaagaaacggctattgaattcgaaaaaaaattccccatcgatagtataaaaattccattttaccaatctcaactattgtttgaaacattgaatgagcatattttattcaaagaattaccagataaagattatttgttgcaaaaattcagtgaatatccaaatgtcatcccaccaactcaagaacaacttgaaactttctataaaatttttttactaaaaataaacaactgtaaagaattaaaaaaactccacattgaggagacttataaagataagatattcgatgtaagcaatgagatcattcagataaaacttttgctgcaatcatttgatgaaaaatttacttttcacttaaacgataattggttaaataataaaaatagagaagctatagctgatttaggaggacgttacacacccgaactaaatttaaaattagagatcgcagatatcttcgaagggcttgggaaaactaacaaattttccaaaatattttacgaacatatcgataatttcttgatcaaaggaaacaatcttcgaaactgcgatgaaatacgtgagcagttagctttgatttctaaagccttaacagacacctcaattctgtttctaaaaattgattttcacgaatccaaaagcattccaatcaataaatttaatgaatatatctcaaattgtcaaaaatacatttctgaggcggagtcgacactatggaaaatcgaggaaaaggaaaatccggataagacaacaagttttagcgataagtattcatcaattttgagagacttaagagaattttattatgagtgtgacactttatatatatttctcaattctataacggtaaaattatcgaataacccatttctgctccttgaaggagaagctgggattggtaagtctcatttgcttgctgatatcatcgaatcaagaattcaaacaggatatccatctctatttttattagggcagcaacttacaactgatgaatccccttgggtgcaaattttaaaaaggctacagctaaacactgtatcctcagaatttcttgaaaagctaaatctctatggtgaaaaacaagggaaaagattcctgatatttattgatgcaataaacgaagggaatggtaacattttttgggaagataacatcaatagcttcgttgatgaaataagaagttttaaatggcttggccttataatatcagtcagatcaacatataaagatattactatctcaaacgaacggatctctcgtaataattttgaaatttatgaacacttgggttttaagaataaagagatggaagctgttaacttattttatgataattataatatagaaagaccatcatcacctaatttaaatccagagtttaaaaaccctttatttcttaagttactatgcgaggggataaagaaaagtggtctgacaaaagtccctgtaggatttcatgggatttctaagatcttaagtttttttgttgaaggcgtaaataagtcactatcctctcacaaaagatataatttcgatcctagtttcccattagttagtgatgctctcaataaattaattaaagttaaactagctaatggcagaaatagtattgctcttaaggatgctcatacagctgtccagtctgttgttaaagactatgtgaacgataaaacatttctcagctctatgatagatgaaggaatactgaccaaaggtatcgttcgcaatgaagacaactctgttgaagaggtcgtttatatatcctttgaaagatttgatgatcatttaacagttaactatttattaaatggtgttgataacattgaagatgaatttaaaacaggaggttctcttcaaaaatacttcaatgatgaatacagtttttatcgcaatcaaggaatcattgaggctttatctattcaatcaccagaaaaatatggaaaagaaatttatgaattactgcctaattacagtgacaattataatttagtgactgcttttatcgatagcttagtttggagggattccgcagcaattgattttgaaaaaattaagccttttgtaaacaagcaagtactcggtttcgataatagttttagtcattttcttgagacgctaatatctatttctggattagaagaacatcctttcaatgctaatttcttacataactggctattacagcattctttaccaaatcgagatgccttttggactactgcgttaaaatatagatatagtgaagactcagcatttaaaaatttgattgactgggcatggagtgggactgataaaagctatatatcagatgattcgatagagttagttgcaaccactctatgctggtttttaacttcaactaatagagagctaagggattgtacaactaaagcattggttaatttgttagaggaacgtatctccgttttaattaggataatcaataaattcgatgggataaatgatccatatgtttgggagagagtgtttgctgtagccctaggttgcacattgcgaacaaagaatcataataagctaagtcaattggcagagacagtttttgccaaagtgtttcaacctaaatatgtgtatccacatattctattacgagactatgcgagagagattatagagtatgtttcacatcttcaattgataccggaaggactcgacctatccaaaactaagccgccatacaaaagtaaatggcctgaaaatataccaaccaaagaagaacttcaatcactttataaaaaggatgggtattggtcactttggggatccataatgggtggaggagatttttctagatatactattggaacaaatcataatcactcaaattggtctggttgtaaatttggtgaaactcctattaatcgcaaaaaaatttttaacgattttctaggtcaattgtcagacgaacaaaaagcgctctacgactctacagaccctattatttacgataaaaattataaaagcatttcattcggtaatacacttattaaatatggtgtagcaataggtagaaagagtgaggaggaagttctttcccataaatccgcgttcaagaaatcattgccagaggacttattagctacatttgaaagagacatagaaaaatatttagatcacaataataatctgctcgaaaccgataaatattttgatctaagaattgctgaacgcatgatttttaatcgtgttattaaccttggttgggatccaaaacttcatggtgattttgataagcaggtaggctctgggcgcggacgaagagaatcgttacaagagcgaattgggaaaaaatatcaatggatttcttactatgaatatatggcaatgctttctgataattttattcgttttgatgggtatggagatgaacgcaaagaaaatccttatcaaggaccttgggatccatatgtaagagatatagatccaaccattttaatcaaaaatacaggaacaaaagagttaacccaacaagaaatgtggtgggatactaaagaagtatttgattgggattgtacttttcaagaatgggttagcaatccttccacgataagtaatccatatggactgattgaagtcaatgacaacaatggtactgaatggttgatattagaaagctatccctcatggaaagaacctaaaactatcggtaatgaagagtgggggcatcctcgaaaggaagtttggtgtcaaatcagaggatatttagttagaacaacagaattaaatgctcttaaaaattgggcagaaaaccaacactacatgggcaggtggatgccagaaggaagcaataggtatcaattatttaatagagagtattattggtctgaagcattccattattttaaatcagattattatggcagtttagattggagttctgtaacagatcaagattctggagctaaaattgctgatgtaagcgtcacatcgatcaattatttatgggaagaagagttcgataaatcaaaaacagatactttaagtttcctcaaaccaaccagcttaattttcgacaagatgggcctcaaagatggtaaatatgaaggtagttatgaggataaatatggaagtatagtttgtttcgccactgaagctttaaataactcaaaagcacatttgttaattaagaaagagccgttcttaaaaatgttgaatgaaaataatctagaaatagtgtggacgcttcttggtgaaaaaggtgttatcggtgggtccttaagttcaactcaccagtatggtcgtatagaattcagtggttttttttcttacgacgatggaaaactgactggagcaaacaaaatatattcatcttgatatttcctttaacttgaaattgtagcacagatagagacctatttgtgctgctaactaattcacgacattctcattatcaagtttttatcaatgatttagcttttagcttttagcttttagcttttagcttttagcttttagcttttagcttttagcttttagcttaacgttaatggagtttttgtagtagtgcattgccatccgttaacctctgaacatcaactcccaataagaatcataggaattaaaactctcaatttcagtaagttaactaaattctattgattttgacagccaattaaatcttctcggactaattattttttatccggattcccatttttcacccggacctatacctcccctccccgttccgcgctataaccgctccgatactctgttcccgtgaggtgcaatcatgaaaacccgtgctgacaataacgatgcttttcccgaaagcggcaatgtgcgtatgcggcaggtggtccagtttctggcgatgagtgaatcgtcggtttaccgcctgattaaaaacaccgactttccccgccccgtccacctatcttcccgactggtggttttcgatgccgctgaaatccgccagtggcagcagcgccgtaccgccatccgttaatccacgctcagggatgagccgaccgatacctcatcatgaaacgcgccccttttctctgtaagcagtctccggaccgcacgctcgaagtggtgatccttgccggaagcctggcatgggagacctcacgcgactggcgaaaagatcctgaccgggaagatgatattcctccggtggtactcggcccggatgaactggccgatctggacaacctgaccataatcaggcccgacacgctttacgtccgggtacttcgcaccggcgatatccgcgaagaggagttgctgaaaatcgccgtaaaactggcgcacgcgggtgtgcagatggcccggctgatgagccctgacggtgagttactggagaactggaccgggcagcttgaacgcctgcgacaggaaaggccttccgatatcctgccggatcacttccgcctcgatgaagaagcgctgtggtttgacaagctcaccgaacgacgcgacggcgaaagcgacgtccagccccagcgcatctgttcccctctgcgaccgggtcgcccgcttccacggcaccgcctttcgtgcctggctgaccttcctcaccggcgacctggacgccagcaccacgctggcgagagagttacttcgccgctaccagacggccctgatgccggacaacgccggaaatcaggtgcagcgcatcgtggcccgctttgcgctgctggcggtggccggagagatagcgacgctgcagggcattacgggctggcaggaaggcacggcgtatgaggcggtccggatctgcctgcacgcctggctgaacgagcgcggccatattgccaaccaggaggatgaaggcgtgctggcgcagatcaaacggttcatcaccgcgcaccagtacagccgttttgcctcgtgggatggcccggaccgcccgctgaatatggtgggctttcgccgggtggaaaaagatccgctgacgggcgaggaacacacgctgttcttcatcctgccggagggctggcgggaaatatgccggggattcagtcccgcaagtgcggccagattatgccaggaagcagaatgcctgctgcccggcagcgacgggaaataccagtcgcaggttcgcctgccggagatcggcaaagccagggtctaccggctcacctcccgcatcctcagtatctgagtgccatctcgcgtgtcttaaataaaggtggtacagaatgggacaagtggtacagagtgggacagccgttgctgaatctgtcccacttttccgactgatgtttttcaggtggtacagcgcaaggccacggctggcgcggttgtaccacttgtcccacctgtaccacctcaaaaacagaaggaatgaaaatggcgaaaagggactgaaaaggcaaaggctgaaaggaagggagaataaggggaacgggcctgctcttaaagggtcaaatagctcggtataaattgattcctaacgtataaaaaagacatcaatttccagagccactaattagtttgtttagttacaaacgatatggtcctgtgaatagttattttcatagagtcatacagataaaatcatcgtcccttgttcattatctgacgaaaaaaggaaaataccatgaggccacaacaagcgttcaacatgaacgtttagtgcatataagtcctctctagtccaagatggttgcttccagaagcgttcaagatcatgtgcaaacacatccacccacccagcaagttcacgtgcggcgattgctgcacctacatcagtatcagagtttagtaacggtgatttacttattccctgtaaatggccgattaatcgagccatagcaatcaaaatatcagctactgcagcatgcacagtcctaaacaattttgaatgattgttgtctattttatgttcttcttttgcgctaactatcttaaaaaaattcgaatcaagggctctaattacgtaatgtgaaaactcctgttctaataatccttcggctccaaattctgcacttgcaaaagcataataataggcacgcagagcctttcgcatagcacaatgcataacagctggatgattattcatcattacgggctccagcaggaattctggaagtacatactcaaagtgattaattgtatgaacaataaataatgatgaaacaagaagatgaatagctacttccctattttgcagatcttcaccagccaaagcatgagcataatcttgatgaaagacaatgcgtacttttattatcccattccgcttgactaaaagagcagcaccaccttgagcaaggtaatctgcttcactttctggagtttcatttccatcaaaaccacgttcgatatcttcaagtgccttttcacaattagatgcatatgtaattccatccaatcgtgaaagatccagccattggcttagttttgccacaaccccctgaactatctcattaatattctcaatatcatcactaagcccatcattaaaagtaatctgatagctaaatgaaggacaagagatactttccgcaacatttaaattatcataggccttatgttcacatagagtatccaatgtgtcatggacaagattatccattctatttttccatcgcccaccaatatttttacgtaaatattcatgagcagatgatgcagcaataaataattcatcactgcattccgaggcgtcatcgttgaatccagataggtcaacattgatattactcgctcgaactccaacaagtagtttctcggaagtaagaggcatgatgacagtagagatagaggaggccataatatagggaaggtaaacaccctcttcctcatcaaaaccaatagctatgcaatctggcataatcgccccttcttgcggggcagggaaaatacgccataataatgattcgagagactgcttccgagcctctacaacaacaccattattaagtacctttttatggccataactaatagcatcctcaataccagtgagaagttgagtgaacaagggctgtaattgaaagtaaaatggatttgcatcacctaaaaaactttcttttgcactcataaatagcattcgctctatcgaatcttttggaatgccaatttcctccgaaacaccccccaaggatttagctatttccggatttctattgaaagaagatgctatatgttcactccattttttatttgttgtaggttcatccagccctaaaagagatatcattaacgttttatcagatattacatcagctaagccagagataagtttttgtgtgccatggccaaatatactacgaaggcttttacttctaggtgttaaatgtgcaattacttctgcagcaatagatgcctcgacatcagtaccaacgtttttttcccgcaatatgcgaagcaattcccctaatctaccttcataatccgtcagtttatcatcaagagttttatttgcatcatttgctggcttagagtaaaaatccctttgtgctgccacactatcagttttagatatgaacattttatctctgcgataaacgtgtgtttgcccagattgctggcatatgagaaacccgcgcaggaataactgtggtatatagtgctgttttctgcctgacatactgatccctcaaatattttacttcagatcatttctaattatttggtgataataataaagtgcgaccggggttacgctttttaaaccgatgatattgaagaatcaattcagctaaatcatcgtcaacagcataaaaatacgcttccggtacatcaagcgctgcagccagcttacagacgagtttgaaatcgggtgcatggacttccttttcatacgaactgatccgcgcgcttgcggattcttcatccagccctgcgagtacacccagttccgcttgcgtcagatcagccctgactcttgaaatctttaatcttttaccaatcacgattgccaccctgcacctgaacatgcaggaattatccctttctgggcagcaaccatcttcaggcattcccttatctattcatgtattacttgaattttgattacatttagagcaatattcaagaattgcgtgatttatcacggttaaaaagagaaaaccgatgaaaaagtcaacaaccaaagactggcaccccgccgacatcgttgccgccttacacaaacgcggtaccagtctggcgaaactgtcgcgggaagcggggctggcctcgtcaacgctgtcgaataccctgacgcgcccgtggccgaaaggcgagtggctgattgccatcgcgctcgacatgcatccatcagaaatctggcccggccgttacctcaattccagtaacaaacgtgaaccccgaaaaccgcttcacccgatgacaacaaccgacaactccgggacataacgacccgcgctgtgagtggcaggacgcattaaccaacgacacctgacaggagagttgtttatgcacaccgaaccacaaccatgcaccatcgcaccactcgcaggaggccgccatgtttctggtctccctggctgaaggcttcatccacctgttccaggccgcaggcaaaatcttcctcgacatgatgaccgggcttatcccgatgctcatctgcctgctgctggccatcaacttcctgatgaagctggttggcaccgtacggatggagaaagtcgccgccctgctcggccgctcgcgcatcctcacctacggcgtgctgccggtactcggctggttctttatgagcagccccggcgcgctgacgctcggtaagctcttacctgagaagagtaaacccggctatgaagatgcactcggcaccactgcccaccccctcaccagcctgtttccccacgtggtgccatcggagttgttcgtctggctcggcgtggccgccggggttaaggagctcggtctgcccgtcacctcgctggcgttgcgctatatcgctgccgccatgctgattggtttaattcgcgggattatcaccgagtacctgttcctgcggctcagcaggcgggggaatgcgccatgatgatttactgcgcgcgtatcgtcgccatcgggctgtttgtcgccgacggcctgaccgacaagatgctcatcaccttcgacagcaacgggccgaaggactgtctcgattactccctgtcgctggagccgtcgttccgggaagagagcctgatgatactccccggcgaccgcctgctgctggcgggccatgattatctggtgaccagtgttggcaaaggggcacaacaggcgctgtttgaactcggccacctgacgctggtgtttaacggcgacctgaatgcctgccatgtcggcgcggttcatctctccggcccggtgccgaaactccgcgacctgcacggcaatctggtcattgaggagggacgcccatgaacacggtgcttattccccccggccccggtggctacggcaagggactgtggctgcccgtcggcagcggcaaaaaggtgctgtcgctcaccgggcgggaaatccatccggtggcgattgaaatcggcgcgctgacgcagtctgaggtggtcaacggctttgccgatattccgccggataacgacatcctctgcgtggtgattaactgcgcaggctctctgcgctgcggcctctatccgcagaaaggcattccgaccatcaacgtgctgcccacctggcgcgccgggccactggcgcagtttattaccgaagagaattacgtctccggcgtcacgatggagcaactggttctggtggataccgccgaagccccggacggtaaacctgaaacgactcaggagcctgcgccacgggttatcagtacaccgccgtctccacgaggcgcggagaaactggtgcgtatggtcgagcagaccggcaccgccgtcgggcacgttatcgccctgctgttcgccgccagccgcgaggcggtggacgtgtccctgcgcaacgttatcccgtttatggcctttgtctcgctgctgattgccctggtgcaggaaaccgcgctcggcagcctgatagcccatgccctgacgccgctggcgaactcgctctgggggctggtgctgctgtcgctcatctgcggcattccgttcctctccccggtgctcgggccgggggcagccatctcgcaggtgattggagtgatgattggtacgcagattggcgcgggtgcgatatctccggccttcgccctgcccgcgctgtttgccatcaacgtacaggtcggctgcgacttcgtgccggtaggtctttccatgcaggaggcaaagccggagaccattgcgaagggcgtccccgccttcctgctgtcgagacaactgactgggccgctggcggtaatagtcggctggttgttttccctgggcttattctgaggactccatgatgaacaaaatcagagccgccgtggtcggcgcaggcatctacggcagacaccatatgaacgcgtaccgccataagccggacacggtgctggtcgccatctgcgacaccgacatagagcgctgcgacgaccttgccatggcctacggcgtgatgggttatacccggctggatgtcctgttgcaggaggaagccatcgacgtggtctcggtggcgacaccggacccgtaccacaccgaatccatcctcaccgccctgcgccacggcaaacatgtgctggcggaaaaaccgctcgccacctcagtacgcgagtgtgagcttatcgtggagatggcgcagcagcgggacttgctggttggcgtcgatttccacaagcgctgggatccggcggtgatgcgcattaaggctgaactggataagccggaagccgggcgcatcctgcgcggccatatcagcatggatgacgtaatcagcgtgccgacggagtggctggactgggcggggcgcaagctctccggtgtggtttctcggctcacactgctttgacctggtgcgccacctctccggccaggaggtggtgtcggtgtacgccgtcgggcagaagcggctgatggctgaatgcggcctcgacaccttcgacagcgtgcagagcctgctgacgatggccgacggcagttcgtgggtggtggaaaactcgtgggtactgccggagggctttccgaaggacaacgacgggcgtatcgatattctctgcgaggcaacgtatatccgcagtacttcccaacatcgcgggctggaaatcaccacgccgggcatgacgctcacgcccaacagctatttcatcaactaccgcaacggcatcgccagtggtttcggtatcgacccgatcaatgactttgttcactccgtcagacataaagcgccgtacccggtcaccgcaatggacggactggcggtcagccggatttgtgaggcagtgcaccgcagcctggaaagcggcaaacctgaacgcccgataaagccataacttcaagggctgtacctgtctgctatgtcagactggtaaagcccttaacccagcaagctagtcaaagcacaggaatgatttgaaagcatggtcagctttgagcgagaagcagaagtttctgcttaattatttatattattggtgatttaattcccactcaatacatgatttcatcataggaataaacctctcacaagatgatgaaaatacctcaacaaattttaatttgtaactttccggaacatgccaatcttgagggatgctatctgcgatggattgataaaattcaataggtatttcacaaattttatccatacatgatttatactcttctgcagaatgcaaaattccgcgatgatatggcgatgattcaataaacaatttattttctgtccatataagaccaccttccccccacgcctcacaattatcatcctcaaaggctattccagcatccatgaatagcagttcaccatttaacaatttgcaagtatcattttttacatcacctattgatagccaattatcaaatattgatttgccatagagattttttatttggttattactgaattgataaccctcaggcaactcttctagattatgcatgaactcatatgcaataaaatgagaagttgatacatttagttcactctttacactttctgaaaactgaactagatggccctttggccaaggtaaacctatcttctcagctaatttaaaagctactaattcattaaataacgcatttgtttcatgaccggacttgctgaaatatgtttttacaaaccaatcattgcctaactcatcaacaccaataaaaggattggagtgatttgtggatttttccagtttatctttaatggaattaattataatcacggtaaccttcaatagaaacaataaaatatgacgcgaagtataattgtataaccaaatagagcacaaacattttcgagagactcctgagttattaatttttctacgtgagctacctctggtgaagagtttactcacttaaccgcatgtccactattggtgggtaagatcattaaacatgtatcaaccagactgaaggcataatctttgattattccgacatctggcacacagtcgcgccagatgccactctgttcttctaacctcagtgatgctgcaacaacacctgtgaaatcttcctcgcttcatccgccggatccgccgaatgcgtgatcgccgaccccacaattaccacatccgggcctaacagcgcatagtccttcaccgtctggctgctgataccacctgccacggcaatccgggctttacggcgcgccttcaacatcgttatcaaatcatcaatcggcttgcgccctgccgcctgctggtcggtgcctgtgtgtaccgccagcatatccgcgcccgcctcttccaggaggcggacccgcgcagggagatcgtcgacgcagatcatatccaccaccacctgctttccggcctctttagccgcccgaatgcatgactggatagtcaacacgtcagtcacgcctaacaccgtgacataatctgccccggcgtcgaaaagcatctgcgactcaaaatggccaccatccataattttcgcatccgccagcacttccttatgcgggtatttttctttaatggctttaatcgcgttcacgccttcccgaattagaaaaggcgtgcccacttcaataatatcaacgtcgtcaaccaccttatcaataaataccagcgcttcaggcagggttaactcgtccagggcaagctgtaatttcatgttggtttccttgtgttgaatgactattcgaggttggcgtgcagcgcaaagcctttggttaagtgatatcccgtcgactgggccagattcacaatcatggcgtcacccagcaccatgacagcctcttcaaacaggctgccgccgggcagaattcctttcacgttatccggtccatccggcaatttgtcggtataggccgggatcctgaccaccacatccgccagtttccccagcgtggactcggggaaaatggtcagcaaggccacggtgccacccagttgcttcgctttcgcagccacattcaccagcgaagccgtttcgcccgatgcactcgccagtaacagcaggtcgcctttttgcagcgcaggcgtgaccacatcgccgacaacatgcaccttcaggccgatatgcatcaggcgcatcgcaaaagctttcagcattaacagcgaacgccctgcgccaaaaacaaataccgcgttcgcctcagcgatggcctgctccagactcgccagtgcggcaccatcaatccgcgacatcgcctgatgcaggtcagtacaggcaacgcctgcaacaaattgcgtttccatcatgcgtcctcctgactgagcgggaataaatcatcctgatactcgagcatccccatgatttcccggacatagttatcgacatgccccagaaaatggaaacgttccggcgcggcgcgatagcgctggtaaagtggcgtatcgaaggtgatgccaagatgcgggttctctttgacggtggcgaatttgatgtacggaatatgcggatagtaatgattcttgcgcacgcagagctgcccgttctcctccacgatgtagcaggccataccgtggtaaaactgcaccgtgtcgtagtgaaccgcgcagggtttatacgccaggttgctgaataccagcggcccgtcgccgatattgatagagcagtggccgtaattcggcggcacgataatgctctgcccttccttcaccaccgctacgataagatcgtccaccagcagatcttttggctcaacggcaaaatccggcgacttttgcaggatatacgccgcagtgcccttaatcacttcatacacttccggatgggtgttgcgccgcgtatcgttatagccgtgatagtgaccgctggttttcttgcgctccttgccaatcgttcccggcatgatgatggtgatgtcgtactgatactgatcagcggcaagccgttcctgatcctccggaaagcacaagccgcgataaacatcgtaagccggttcatcgcatagcgcttcggtgaactccggtaagaccaccgccatctgcccggcgcttttgcggccaaagccgagatagtttagcggcggtttcagcgccattacgccatcatcatcgagatacagcggcaggccgctgtggtgtagctgtttcattttgcctcctgtgtatacgcgttagctgcgcggatcgcctctttcagccgatcggacttcatgccaaatacgctctggatgttgttcccgacctcgacgatgcccgccgcgccaagctgtttcagcagcgctttgtccaccagcgtcttatccgttacgtcaatgcgcagacgcgacatgcaggcttcgatgctggtcatatttcccagtccgccataggccagaatgatgccgctcaccaggtcgttttgttcgctttcctgcgccaccgcgttttcttcaacctcacgccccggcgtcagcaaattccagctacgaatagcaaaggtaaacagggcgtagtacagcgcccccatcaccagcccgaccgggaacaccatataccagtgaggcgcgcgcggcaggacgccaaagaacagatagtcaataagcccgccagagaaagagagcccgatatgcacgctgaaccactccatcagcaggaacaccagtcccgccaggacggcgtgaatgccatacagcacgggcgcaacaaacaggaaggagaactcaatcggctcggtgatgccgcagacaatggaggtgatcgcgccagagagcataatgcccttcacccgcgctctgttttccgggctggcacagcggtagatcgccagcgcaatcgccggaatacagaacattttgatgggcgtcagcccggccataaaggttccggcggtaatcggcacctggtctttcaactgggcaaagaagataagctggtcgccatgcaccacctgcccggccttattcacgtactcgccaaactgcagccagaaggtcggccaccagacatggttaagaccaaacgggatcagcagctgctcgacaaaaccaaacaggaaggcggacacgcccggcccctgcaccgtcatggtattcgacaggccattaatcagatgctgaacaggcggccagaccaccgccatcaccagcccgacgaacagcgcggcgaaggaggttataatcggcacaaaacgcttgccggaaaagaactccagccacgaaggaagctggatgcggtaatagcgtttatacagccaggcggcgataatcccaatgatgatgccgccaaacacgccagtctggagcgaagggatgcccagcaccatcgtgtagtcacgcacctgcgccaccgactcgggcgtgatccccagaaactggccgatggtgacgttcataatcagaaacccggcgatcgccgacagcccggcaatgccctgatcgtcactaagccctaccgccacgccgaccgcaaacagcagcggcaggttagcgaaaatcacgctgcctgcttccgccatcagcttcagcacgtgaaccagccagtccgcgccgagaaacggcaggctggcgacaatattgggatcctgaaagctgacgccgaaggccagcaaaataccggcggcaggcagcatggcaatggggatcatgagcgatcgcccgatgctttgtaacatttgcagaaggttgaatcttttcatctcgatctcctgagcgcgtctttatgacagggattcgcacaacagcaggttctgctccgaacaccttcagtatccgaaccggggatgattaaaaaaacagcaaccaaagacgaaagttatttccggttttcgcttaaaaccggaaaatttatgagggcaatcacgccgcaaaccgtcagaaagagataaaagaggaaatcgcgttcggcgggaggccatcatatgaatatcttcgaggcgcattttcgcagactgcacgcccgctacggcgcaggtcagacgcacgaattacagatgcaggagatcgccgccatcttcggctgttcagtgcgtaactgccgtattgcgctgaagaagatgcatcaggaaaaatggctcgactggcagccgcagcgcggacgcggcaagcgctcacggctccatctgttaacctcgccggaaaagctgttcagccagaacgtcaataagctgctggagaagcaggattacggcaacgtgctgaggtttatcggcaacgacaagtatctgctggatcgcctgagcctgtggcgctttggggtacaggataaaagcagcgaaacgcgggtgcgcatcccctactaccgcaatctggatccgcttaatccgctcgttcccctgcggcgaaccgaacgccacctcctgcgccagtgcctgagcgggctgacgcgctatgacgccattcagggcaggatcgtccccgatatcgcccactactggacccacaacgacgactttacccgctgggagttctggctgaaatccaccgcccgctttgccgatggcaatgagctggatgccagcgccgttcagcgcggcctgctcgccgccagccagagcccgcagttcgcgccgcttttcagcccaatcaaagccatcaccgctgacgccccctggcatctggtgattgaaacgcatcacccggtcaggcggctcgactgcctgctcgccacccagccgacgatgctgtttgattaccagcacggacacatccgctgtaccggcgctttccacctgcaggagcacagcgacaactttatggttttgcggcgcaatcaacactggcatcaggcgcgccccggactggatgagatcaccattttcacctgggcgccagaacatatcagcatgagctttattcccctgctgcggggcgaagaggcgcaggatgaccgcccgcttaacgagcgtagtctggaacagggatgctgttttgttctgctcgacggtgacggtgcctttgcggatgaggccagaagacggtttatcaattatctgctgcaacctgtcgaactcctcagccagacgcagcttcccgacgaatacgcacgcatcctctccgttgctcagggcatgctgccgcattggaatcaccgcccggtggatttcggcgggatcaccgcgccgtttaacctgcgtcagccggtgatcatcagcacctttcagcaaccggaactggcggagcttgccggggcgattcgcatcctgcttgagcgctggcatattcgcgccgaaatacggatcgacgcatttgaccgctttaacagccagccgcttcctcctgcggatatctggctcagcaactttatgctcgatacgctttcggttccggcgtttctggaatggctggcgtccaccacgctgtttacacgactgcctgaatcccagcgacgcaacctgaacgccctgctgtcgaccattctgaacagcgacgatgaacaggcattcgccaccattgccgcctttttccatgagattacccatcaacgatatgtcattcctttgctgcatcactggatggaatttgcgaccgagaagtcatttacctggcgggatttaaatacgctgggatggccggatttcagccaactttggctcgaataatgctacgcccgcaaaagctcgctaaagggcctttaaaggcctttaagggtaagggagagaagtgtgggatttgggggggaatgtttgaccatctgcattggctacgtcctcacgacggagcctgttcaaaggcctatgtactgacgccccaatatggctttaccgccagcgccgattgttgaacacgtcaatgtcatcgaagatatctgcatgatccagatcctgggttttgtagacccgttttctgatgcactgctttttcagcgaactgaagtaaggtcgtagaagtaaaacagtaccgcctggcaactcgggcattttctcgttctaccactgtgcttagattcagcttatgacgtcagccgatagtgcgactgcaccagacccgaagggaagctgcggctggataatagcgtcaaatcgacatcatggggcagcactccgaacagcggttttcccgaaccgagcaggacaggaacggtagtgataacgatatcgtcgaccagaccttcgcgcaggaacgactgtattaactgcccaccatcgatatagacccggtgcacgttcttctccatcaggtcagtaagagcctccctgggcgtgcggcatgaaaactgcactttgcccttcagcgcctcaggcaccggggtattggttagctgccgggaaagtaccagcacgggtcgatcataaggccattcctcaaaagtcagcaccttctcataactgcctcgccccataatgatccaatctttgtccgcgatgaatgcggcatagccatggtcttctgtcgggtcatcgcgcttcaacagccagtcgatatcgccatcctgtcgagcgatataaccatcaagactgaccgcgatgaaaacatgtgtggtaatcatcaagtgctccgtattcaggttgcatatatctcgttgagtttagcaatgtaaacgatattgatatgctccgataaagccacatcataatgttctcaacgtccgttctaggcacgaagcaagcaagttatctaagctgaaggtccgctgtgagcgagaagcagacattgtgttcatgtggaaaaccggaagatttagcatccggttttccgcactcttggattacattaatgatctccagcatctcgtgctggcaccgcagcagcttgtcgcacttgacgacgctgatttcttttttcccactttgctcgtaaccattcgctatatgccggcatgttaaggtataactgctgtgtcatatcggccagaacgcgaagattatctgtatagccgaagtgtccctttcccatttcagcatggcggccacctgcagcatcccaggcttgagaaagcgaatatggtgcgaacagctctagaccagttaagagtattacaggagcccttgtttgtcggcgctcgtggatgtattcacgcccccaagacgcgagttttgtaattcgctgaatttcggccggggaaagatctcctgcctgcttcatggttgcaaaaaccaaaattgcgccagggaagcggatagcaagttgtttcattctttctacatcttcaacttcaaatgcatcagcaacagcttttttctcttcggaattctcgcccctaaagctttttgcctctccaaatacgagttctgcgtggtgatccagctcattgaaaactttgcgtcggtgccagagtattaggtcagcttcaatatattgttttggggccaatgtcagtatttggccggttgaccatgtaatcgtggcatcatgatttccaaatgtgttggcgagaaatcttagcgttagggatgcggcgtatcccccacgagcataatcgggaagtgcaaaggggcctatcaacctgtaagcccaacgggacaattgactcgaacttggatcgatcattggaaagctaaacttatttaggcaaaggccgcatgctactacaagatccagttcgcgtagcgcgtgccatccccaagtagagcattttgcacactttaactccaagccaagctcaacagcaccaagctcaactaaagtttcagcatttttatttcgccatatatcacccttcaccacattattaattttattctgaaattcttggtgttgaattgagggtgaaatgggccgtcgagaaattttattgagaagtttcactatctctgcatgagcaaaactactaattcccctgaaacctccgagcgtattaataatttgctgtgtagcttgtcctgcatcggagatttggctttcaactccattgttttttagccattcacttatcgccgttgtgccgtcactcaaacgccagagatcggacatattatggaaacggcaaaatacaacaaaaccttcagttgtagataagatgcttctctgtattgactggaaacgtggcatcttgggcgacctgtaattacaaggataaacggttgcagcccgactggtatttgaccaattttttaatttcactacgttcacccagcgagcatcattggcaccatatctttcagtgaattctggatggagataatcaaatcgaacttcggttcggtcaccttcgatttgtgtgtcaaacgttttttctgcacaggatagagtaggtcgagtactgcgaactgtaaaaccagatgatggtcgccaaatcggtggataccaatcttgacgcctatttgcctcatcttgattaacccgcaaatagtcggcgtaaagttgttcgatattcgcagtagggatagatcttgcaaacattacggtagcatgagtcattaagccaaattgattccctcgaacggggcgatggcaatcttcaatgtattctctgcagtatggggaaagcgcatcaatccattggagtggaattggtcggacatatttccgcatagcgcgaaggttccagaagtcaataagatcgcgcgagtcatgtgcatccatgacaaagagcgttggatccgcattgtcatgataattaacctcaatattcgagtgaccgatttgtagtgctgaattaaatccatccttgtacaggtctactagagcttctggggataattcaacctgtttgggatcaaaagcatcacagaacccttggccaaaatatttaaggtcttcatcctcagggaagctgccagataggcaagcacagaacgacttcaatgcattcgtccgaggtatgagttccacgatattgtgctcatgtcgacgcacgaattgaaattgtttcttatacagatctttatataggtcgaagacatcaagcccagcttgaccccgcagttcatcagatcgccttagcatggctgaaagttgcagtactcggtctgggtcatagccaaaccctttagccagccctgcttcagcttctacaaggaaatcaggttcgaaagcatcaagatagccattgacgatctgcaaagcgctctcaggtttgtagtcatccctatcccaccatttaggcacatggccaaaaattggaatgatagggttaaatttaccgccccaaaggcatgtgtttatttggaagatttccagtaaccgtttactgtcattaggtttaacgaggaatgcgaatcgaattggtcgtagggttacgacggcgctgatatgagccataattcttcctgtcagaatgtagtacgttcactttgaggttgcataaccgatttgtcacgcaccgcgtaactgagcgtttacaagcattctactttgatttacctgccgtttaaaaatggtttaagcattatgttgtgtggaaaaagaggctattgatctacacctaaaattaaatctacgttcagttaataacgtccgctcttggcacaatgctgacgggacatgagcactctcggagttcggaccagaaatggaatggcctgaataagaagggtaagtcttataacgaaaaggccgcgaaagcggccttttttagtccgatgcaacctaactagactgttgaaacggcaggctttaaagtaatctcacgcaagacgttaatcagctcgcggccacattttaagtgcggcattccctagcaacgcaccacgggagagaatttgttcctcatcccatctgtctttaacggtcagaggcacgttcaaacgcaggctggtatgggcaagaaaagcatcgcgtttctttagaaaatctgagtgttggagggatcgattcacgctgaggttaagtaacgtaagatttcccaaagttgcaattacttgctgccgtttccgcaccagttcctgatcaggcgtcagctccgcccctgcaagaactatctgagcaaccgctgatgcttctgtatccgtaacagattgcccattttcgagaggccagtgagagaaccactgttgaggcataaggtgatcgatatcaaggctggaaagtttaggaacatctggttcctctgttttaacctgacggcgcagttccccttcaagctctgtcagcatcatacgcatcttcggtgtatcaagcctgccaggataaagctgtgcggtgatacaggcattaaggaattctgagtcagtcggccagcgagaagcctcgccattcagattcttaaggctgtagcgtagctcaatactagaaacggcagttttagccaggtgccgtaagacagccatgaatatgttattgtagttcttaggtgtcaacccacacacggctcttcgtacaacatatgagactagatcattaaacatgattgtcttttcggtatcagagatatcagtgactgaaatcaggagcgcaagaggatgaatagtcgtcacgtcataggctgcaatacgacggccaaagcgcgcgacaggagtcgtaccactatctccgatcagttctttatattgattagcatagcgagtgagaagcgcgacctgctgatcggcgcggcgcgcaggcatatccttagtcacaaagtcccggaattcattgtaaaggcgcgacaaatccacctcactgcgtttttcagcctgtagcgtggcgtgaattaaccattccagtcggggtttataaatacgaccacggcgttgattttcagtccagtagggatcttcaaaaggcttccagtcattctcatacaacatcgcagcatcaatatcgtcacttacagcgcgcataaagatgtaattgcgaatgagatcagttgcatgaagttctgccccacggccatttaacgtttcaaaaatgatttgagcatcatctccttcctccagggtgatgttgatcattttgaggtcagtcaggactgcattaatcaaagcctctgcatttgaggctacagggtgcccttccgcgttgatgaactgaataaaagcgtcactaaagaaccataatgcttccagtgagggtgggtggctgaaatacttacgcagggtcccgtgttgtgtgaagttttccggatagacctcgcgaagagcttcgactgagtcaacgttgagacttttaataaagtctttttgatcacggaatgtcggccaaagtttgaaacgttcaacgtctacattacgcatagtctcttcgtttatgttgcgtaaacaaggcaatacgatcttctccaggccggaaagtcctgttgcccgaagagcaagacggatggaagcaagaacatactgaagtgtggtgagtcgctgctggccatcaatgatgtgtgacgtatccacccccaataggctgtctttggattgtggttcgagcacgatggccccgaggaagtgaggcgttggttttgttttagaaagtctgctctcagccttatcgataatatcttctaataaagctgaccattggtctcttagtgtccatacataggctcgttgataaaatggaacgcaatactgccgacgattctggaagagttgattgacggtaagcggctctgatttcatggggttcctataataacgttaagtattttaagagcttaagaaacgtaaggttgccaccacctattcaggtaacaagctcctgtagaagtcagttaagatatcgaagattattggtaagcgtaaagtgatagccgcattgacggctatcactttacgcttaccctgtatcgccgtcgattattagtatgtatttgatgagcatggtctacaggccagaaaattaaagagagtgaattatccgacagaaacgctcactttcggaaacgaacgacaagcctgtagcgtccaccagagcctaaactagcaaggaaaatcccactcccaacaatcaacttaaaaatcaatcagataaaaaaacccttccatatcaacatcatcgccactctttttgcgcctttccttcaccgcaaaaaatcaaaatccccaacaaactcaaccacctcccccaccaattacaaggacgccagcaaaattctccatcggtgattaccagagtcatccgatgaagtcctgaaaacccgcacggcgcaagccctgcgggcttttttgtgcctgcaatttgtcccgcgaagtctgaagagaactcattaaatccgaaccttttaggcccattgataggcccaacgaaaagctctgttgttttcgcgttaccaattacccggcaacccatccctctcagaattagaccaccaacgacacctttcaccctccggccgcgtccgcggccggagggatagatttaccccttgtgagaatacgcgtccagcatggcaaggaccgcccgacgcgccgcatcgtctgcaatattctcaggcagcgcatcagcccgcagattgacataagcgtcggcagcccttcggatggcaatcccgacagagtgacgatcgtgcgttgccagagtggaagtcagcaggccatcgggatcaatgccgagggcttctattcgacgaacgccgcgttgcggtagattggcgcgacgaaacagcatcggtcccagcacttgttcccggaagaaagacagcatccccagcgcttcgaagagttcccccctgcccagtttaaccacggcataatgcagccagatccaggcccgggactcaaaccactccggcgtcatgttcggccagtgcgcgctaaattttgccagctgtcgcttgagagcatcgttatcacgggtaaatagcacggtaggctcctcaacgcgctgagtgagcatgtccagggtgataaatttcagatcgacatgcagaagttccgggccaaacaggcagatcagcaggcgaggctcaccgacgtgttccccggtgaaagcatgtagcagatggccgagcgttccggcgaacgccatacgctgagccatgatttcgtcataatagagagggtcgatcaccaccacgaaatccagatcggagtattgatcaaacccgccatggataaacgagccgccggcgagaagggagtggatccgcgaatcagactgtaatttaagcttcagttgctctgcaaaacttctgtgtaaatcgggtagcgtattaagcatactttttcctgttcacaaaaaagacaaagcattacagaatatcgagtgattcattagcagaccagatatttctgctggaaccctaccctccatcgcgaagcgctaaatgcaagcaatactcccctcaaaccacctcgctcatccactcagcaaacgcccgcacggcgggagagagaaagcgctggtgcggatagagcaatgtgacgggtaccgggggcggctgccagtccgtcagcacttccaccagtctcccctcctgcaggtggtcagcaacgatattctccgccagctgcgccagcccaaatcctgccaggcacatttttatatagagccccgtttcattcaccgcggcgttgccgctgacgggtacagaaaaggtctcgccatggcgaacgaagcggaactcatcggcccgcctcgcctgaccggagaaataatgcacagcccggtgctgagagagcgcctccggtgacggcggcacaccatattcccgaagatagtccggtgacgcgcaggtgacccagcgaaagcggcccagagggcgggccaccaggctggagttgttcagctctcccgttcgtatcacgcagtcgacgccttcctgaatgagatcgacctggcgatcgctgacgccgatcatcaggtagatatcgggatagcgccggtaaaagtccggcagatgcggcatgacgatgaaatgcgcgatgcccgcgggcatatcaacccgcaggcgcccctgaggccgcgcgacagactcgctcagggtggattcactatgttcgatgagggcgagaatttcccggcactgcgccagatactgcatcccttccggggtaaggctcacccgccttgtggtccggttcagcagccgcaccttcaggtatttttcaaggtttttaatggtactggtgacagtggaggccggcagggaaagggtttccgcggcacgcacgaagcttcctgcctccgcgacgcgcataaacatctgcatagcctgaatacgatccaccttctttctctcctgtagcgagcagcttaccgacagacggcatgattattcgtggattatgaataatgaaaacaatttacgcacctttttacgcttaatcgcctggcgtatcgttgcacggtggattacgaaagggggccagaaaatgaacatgccctcaataaatattcagataatcattacgttaaatagcatgcacaaaggaaaaaccatgtccgttcagcctgtcgaaataagtaaggcctatcgtttattgcaggtcgggtccaccaccatgatttccgcaaaatatgatggcgtcgaaaatgtcatgtcagccgcctgggttgggctggcaggcgagcgaaaagtggtggcctatattggcacccaggctttcactcgtcagctggtggaaaagagcggctatttcgtggtgcagatccccgtagtcagccagatggcaaccgtcctctacgctggcgggcgcagctctgccgacgcgccggataaaaatgacaccatccccttcttttatcagccggaatttgatcttcctcttgtggcaggctgtgcgggctggctggtgtgcaaagtgatgccctacccggacattcagcagcaacacaatctgtttatgggcgatatcgtcgccgcctggagcgatgaccgggtattccgcaacggacactggatttttgatgatgcgccggacgagctacggaccgttcactatgtcgcaggcgggcagttctatgccatcggcaaaggcagcaaattcgatcatgggccgggtcaggactgaccctccccggtcatgcggatcgctgacgagatgtctgcgcaacagagcggctgatactccggcgccagacgccgggcgcctgcccgtactggcgcttgaagctgcggttgaaggactgctgggagtcaaagccgagggcaatcgccacgttcaggatcggctcgttgctgtgggccaagcgttcgatcgacttttgcagctttttcgcccgaatatattctccgaggggctgcccggtatgttctttgaagatccgctgcaggtgccacttcgaatagccggctcgtcgggcaacggtgtcaatatccagacggctatcaagatggttgtcgatccagtcgatcagatcctgaatgatggcgccagtgttcatcatgttaccccctcgcggccggttaaaagcatctttgtcagttgcatttaaaggtggcctgtttttacacaaaatgcaagttttattgttacatttaaatccacgccgggatcgcggttttttatccccccctggaccgcacataaagtgcaacaattattcttgcacttagttaagcgccttcctacaatcgccgcgatagtgtattcgaaattgttacagttttgtggcgatgatcgacacaaatggccttaagccagcccggacaaaggaagtggcgcggcttctcacgctgcgtcttgcccggcggctacatttaccggaataaaaataatgagcctgcaaaaaacctggggaaacattcacctgaccgcgctcggcgcgatgatgctctcctttctgctcgtcggctgcgacgacagcgtcgcgcagaatgctgcgcctcccgccccgacggtcagcgccgctaaggtgctggtgaagtcgatcagtcagtgggatagttttaacggtcgcattgaagcggtggagagcgttcagcttcgccctcgcgtctcgggatacattgataaagtgaattacaccgacggccaggaggtgaaaaagggccaggtgctgttcacgatagatgacagaacctatcgcgccgcgctggagcaggcgcaggcggcgttggcaagagccaaaacgcaggccagcctggcgcaaagcgaggcgaaccgcaccgataaattagtccataccaacctcgtctcccgtgaagagtgggagcagcgccggtcagccgcggttcaggcgcaggccgacattcgcgccgcgcaggcggcggtggatgccgcgcagcttaacctcgacttcaccaaagtgaccgcccctattgacggccgcgccagccgggcgctgatcaccagcggtaacctggtcaccgcgggcgacaccgccagcgtgctcaccaccctggtctcgcagaagacggtgtacgtctactttgacgtcgacgagtcaacctacctccactatcaaaacctcgcccgccgcgggcaaggcgcgtccagcgataatcaggcgctcccggtggagattggcctggttggcgaggaaggttacccccaccagggcaaagtggattttctcgataatcagttaacgccgagtaccggcaccatccgcatgcgtgcgctgctggataactcgcagcgtctgttcacaccggggctgtttgcccgcgtgcgtctgccgggcagcgcagagttcaaagccacgctgatcgacgacaaagcggtactgaccgatcaggatcgtaaatacgtctatatcgttgataaagatggtaaagcacagcgccgcgacattaccccagggcggctggcagacggtttacgcatcgttcagaaggggttgaatcctggggatagcgtcatcgtcgacggcttacaaaaagtgtttatgccgggtatgccggttaacgccaaaaccgttgccatgacctccagcgccacccttaactgatccctaatcagagaatccaagacatggacttttcccgcttttttatcgacaggccgattttcgccgcggtgctgtcgattttaatttttatcaccgggttaatcgctatcccgctgctgccggtgagcgaatatccggacgtcgtcccgccgagcgtccaggtgcgcgcggagtatcccggcgccaacccgaaagtgattgccgagaccgtggcgacgccgctggaggaagcgatcaacggcgttgaaaacatgatgtatatgaaatcggtcgccggctccgacggcgtgctggtcaccaccgtcaccttccgcccgggtaccgacccggatcaggcgcaggttcaggtgcagaaccgcgtcgcgcaggccgaagcgcgtctgccggaggatgtacgccgtctggggatcaccacccagaagcagtctccgacgctgaccctggtggtgcatctgttttcgccaaagggtaagtacgactcgctgtatatgcgcaactacgccacgctgaaagtgaaggatgagctggcgcgcctgcccggcgtcggtcagatccagatttttggctccggtgaatatgcgatgcgcgtctggctggatcccaataaggtcgcggcccgcggtctgacggcctcggatgtggtgacggcgatgcaggagcaaaacgtccaggtgtctgccggacagcttggcgccgagccgctgccgcaggagagcgatttcctgatctccattaacgcccagggccgtctgcataccgaagaagagtttggcaatatcattctgaaaacggcgcaggatggctcgctggtccgcctgcgcgacgtggcgcgcatcgagatgggttccggtagctatgcgctgcgctcccagctcaacaataaggatgcggtcgggatcggtatcttccagtcacccggcgctaacgccatcgatctgtcgaacgcggtacgcgccaaaatggccgagctggccacccgcttcccggaagatatgcaatgggcggcgccgtacgacccgacggttttcgtccgcgactccatccgcgcggtggtgcagacgctgctggaggcggtagtgctggtggtgctggtagtgatcctgttcctgcagacctggcgcgcgtcgattatcccgctgatcgcggtgccggtatcggtggtgggtaccttcagcattctctatctgctgggcttctcgctgaataccctgagcctgttcgggctggtactggcgattggtatcgtggtggacgacgccatcgtggtggtggagaacgtcgagcgtaatatcgaagaggggcttgcgccgcttgccgcggcgcatcaggcgatgcgtgaggtctccgggccgattatcgccattgcgctggtgctgtgtgcggtgttcgtaccgatggcgtttctctccggggtcaccggccagttctacaaacagttcgcggtgaccatcgccatctcgacggtgatctcggccatcaactcgctgacgctctccccggcgctggcggccctgctgttaaagccgcacggcgcgaagaaagacctccctacccggctgatcgatcgcctgtttggctggattttccgtccgtttaaccgctttttcctgcgcagctcgaacggctatcagggactggtaggcaaaacgcttggacgccgtggcgcagtgtttgcggtgtacctgctgctgctctgcgccgctggggtgatgtttaaagtcgtccccggcgggtttattcccacccaggataagctgtatctcattggcggcgtgaagatgccggaagggtcgtcgctggcgcgcaccgacgcggtgatccgcaaaatgagcgagatcgggatgaataccgaaggggtcgactatgcggtcgctttcccggggcttaacgcgctgcagttcaccaacacgccgaataccgggacggtcttttttggcctgaaaccgttcgaccagcgcaaacacacggcggcggaaattaacgcggagatcaacgccaaaatcgcgcaaatccagcagggctttggcttctccatcctgccgccgccgattttaggactgggtcagggttccggctactctctgtacatccaggatcgcggagggctgggctatggcgcgctgcaaagcgcggtgaatgcgatgtccggggcgattatgcagacgccggggatgcacttcccgatctcgacttaccaggctaacgtgccgcagctggacgtgcaggtcgatcgcgataaggcgaaagcacagggggtatcgctaaccgagctattcggtacgctgcagacctatctcggctcgtcttatgtcaatgactttaaccagttcgggcgtacctggcgcgtgatggcccaggccgatgggccataccgcgagagcgtggaagatatcgccaacctgcgcacccgcaataatcagggcgaaatggtgccgatcggcagtatggtgaatatcagtaccacctacgggccggatccggtgatccgctacaacggttatccggcggcggacctgattggcgatgccgatccgcgggtcctctcttcttcacaggcgatgacgcatctggaggagctgtcgaagcagatcctgccgaatgggatgaatattgagtggacggatctcagcttccagcaggccacccagggcaacacggcgctgatcgtcttcccggtggcggtgctgctggcgttcctcgtgctggccgcgctgtatgaaagctggaccctgccgctggcggtgatccttatcgtaccgatgacgatgctctccgcgctgtttggcgtctggctgaccgggggcgataacaacgtcttcgtgcaggtgggtctggtggtcctgatgggcctggcctgtaaaaacgccattctgatcgtcgagtttgcccgcgagctggagatccaggggaaaggcatcatggaagcggcgctggaggcatgccgcctgcgtctgcgcccgatcgtgatgacctccatcgcctttatcgccgggaccattccgctgatcctcggccacggcgcgggggcggaagtccgcggcgtcaccgggatcacggtattctccgggatgctgggcgtgacgctcttcggtctgttcctgacgccggtgttttacgtgacgctgcggaaactggtgacccgcaggaagccggtccaggaggatctgcccgcctagcctgcagcagataacaaaaaaaccgccttcacaatttgaaggcggttttttttcgtcaccagaaaatgattaatgcgcttttttaaagcgggcgatcatttccggcaccgggtcgcagccgctggtatcggcgtttttgaccgcctccagcgcgctggccacggtatggcgagcgaggacgtttaacgaagcctgctctgcttcgtcggcaaccgatttgaagtaccagcaggcgttggcgctgaccacgcagcgggccgggacgtcaggacgcgatgcccacagttttttatcttcgataaccgaaagatagatatcacgcagggtgatcttgtccgccggacggccaagatgaattgagccgttgcggccaagcgtggagacgataatgccgtcacgagttagcggaaccattagtttacggataaagctcgggttcgcttccaggccgtaggccagaatcgcactcgtcgaacgttcacccatctgctccgccattgctacgctgagaaccatctgcaaagctgtcgggaagcggtaatctaacatggcagtgtcctgggttgcggtgaatcttgttctttttggcaccgcagaggtgaataatcaatgaacaacaatataacaaatacgggaatttttttgaagcaatctgcggttagcctgcgaagtaaattttctgatttcacgggcaaaggcggggcaaacacagattccctttcgtaccgttttatttaacgcaaacgccatcctttgttccgctagccgcgacctgtccacaccagcggcgcctaaccctgtggataacctggaggcagttgcctggcagccgcagcccgggcgggctaccggccgccgttcgttttttgaacaggggacatacccccgccgggcagcgcgctaagcgcgaaaatcaccaccccggcacagggaagcgcccgccccgcttaataattccacttcggccgcgctaccgtatttttcttcagcagatcgcggaacgctttcagatagggttcattgctgcgcccgcgcttacagatggccgagaacggcgactgaaagccaaactcgttgggcagcagcacccgcaggcggttctctttgatccacggccaggcgtaatgctccggcagatagccaatatatttccccgagaggatcagcagcagctgggcgtcgacggtctcgacggtggcgctccctttgctgaagccccgacggcggagatcgctggtgttccagtagctgcgggtcaccagcgggcactggctgatctgctctttatcgagctggcggctgaagaacatcgggtgcagatcgctgcagtagagccagtgctgttcacggtacagcggctcgctgatgatgttatgcacctgcgagttgtagctgccgatagccaggtcgatatggttgttcagcacgccgttcagttgctccgccggggtgcggataatcagtttgatatgcacatggggaaatttgtcgctgaagctgcgcagaaccaccggcagcgagagcgccgtttcggtctcgatggagtcgagcgtcgagatgcacagggtgccgctgtgctcccctttgagcagcgccgactgccgctccagctcattgagttcgctcagtacgcggatcgcctgctgtaaaaactgctgacctttctcggtcagagaaaagccgccgcgcccgcgctggcagagggtgaagccgagctgtccctccagctgcgacatcgcattgctgatggcggagaccgaaatacccagctcctgctgggcccggctgtagctctccaggcgggccaccgcctcgaaaacctgcagctggcgaatattgaggctggcgtcgtgatgcatcgtatttagttcaccaataaatgaactgagtatttacgccagacgatgtaaagtccagcgcgggttgcgcactatctctcctgttacgtttcatccgtcagattcaggagcagacatggataacctctttcaccaaccgcagggtggcaatgagatgccacgcttcgccggccgcgccacaatgatgcgcctgccgtttattgaagatttacagggacttgacgcggcgtttgtcggcattccgctggatatcggcacctcgcagcgctcgggcacgcgctacggaccacgctatattcgcgccgaatcggtgatgatccgtccgtacaatatggcgaccggcgccgcgccgttcgactcgctgtcggtggctgatatcggcgatgtgccgatcaatacctacagcctgctcaaatcggtgcaaattatcgaagattactacactggtttgaatagttatccgctgatcccgctgaccctcggcggggaccacaccattaccctgccgatcctgcgggcgctgaccaaaaaacatggtccggtggggctcatccacgtcgacgcccataccgacaccaatgatgagatgttcggagagaaaatcgcccacggcaccaccttccgccgcgccgttgaggagggactgctcgacctcaaacgggtggtgcagattggtcagcgcgcccagggctatgccgccggcgacttccagtggggcgttgaccagggctttcgcctggtgcaggcggagcagtgctggcatacctcgctggcgccgctgatggccgaagtccgccagcagatgggcaacgggccggtgtatctcagctttgatatcgacagcctcgatcccatctgggctccaggaaccgggacgccggaagttggcggtctgagctccattcaggcgctggagatcgtccgcggctgccgcggcctgaacctgattggcgccgatctggtcgaggtctcgcccccctacgacgtgagcggtaatacctcccagctggcggccaacctgctgtacgagatgctctgcgtcctgcccggcgtgaagtacgcctgaggaagccgccatggagctgaaatgctttcgcactctctggggagtgacgaccccctggccgcaaacgctggatgaactgcagcgcgtcggctgctgcggcatcgaagcccgcgtgccgttaacggtggccgagcggcggcagctcgccgaccgcctgcaggcgtcggggctggagtatatcgccattcttttcagcggcggcggggtgctccccgcccagcatgaaacgcccgagcagcatctggcgcgcctgcagacccgcttcgccgaggccagcagcctcaacccgcgctttgtcaatttgctggcgggcaacgatcgctggccgctggcgcagcaggtcgattttctcggcaaggcgcacgagctggccgccgggtttggtttgacctgcagctttgaaacccatcgcgccacctcgctgtacagcccgtggctcaccctggagatcattcagcagctcccccagctgcgctttaccgccgacatcagccactgggtggtggtcagcgagcgcctgctggatgaccccagcgatgacttcagcgcctttatcgaccgcgtgcatcacgtgcaggcccgggtgggctacgaccaggggccgcaggtgccgcacccggcggcgcctgagtatcagccggcgctggcttttgccgagcgcttctggcaacaaatctggcgttcgcagcgccagcgcggctacccgcagaccacgctgaccccggagtttggcgccgacggctatctgcaccatctgccgttcaccaacgttccggtggccgatctctggtcgctcaacgcctggatggccacgcgccagcaggcccactttcagcagtttttatcgctcactgaacaggaaccgcagccatgaccgccgtgaagcacgcttttactgaactcccgaccatcgatatccgcgatctggccggcgatgacctcgccaggcgtcaggcggtggccgacgccatcggccgcgcggcgcgcgaggtgggctttttctacatcaccggccacggtatcgacccggcgctgatcgccggcgtccgcgaggcggcgaagcagatcttcgccctgccgatggaggagaagatgaactattacatcggccactccaaaagccataagggctacgttccggaaggagaagagatctacggctccggcaagccggaccataaagaggctttcgatatcggcttccaggcagcggatgaccatccgctggtgctcgccggtacgccgctgatcggcgccaacgagtggcccgatctgccagatttccgcgcgcgggtgctggcctactacgacgcggttttcgccctcggccaccgtctgttcgacgctttcgccctcgcgctcggcctgccggaagggtatttcaaaccgatggtgacctgcccgccggctaagctgcggctgatccattacccgttcgacgccagcgtcgaagatgttcccggaattggtgcacacaccgactatgagtgcttcaccctgctgctcgccgaccagcccggccttgaagttctcaatgaagaaagcgtgtggatcgatgcacctcccgtcaagaacgccgccggagaagaggcgttcgtgatcaatatcggcgacatgctggaagtgctcagcgctggcacatttgttgctacagcccaccgggtgcgcaaagtgccgcaggagcggtactccttcccgctgtttttcgcctgcgattaccacacgctgatccgtccgctgccgacttttctcgccgccggcgaagccggtgaatatcaggagctcagcatcggggagcatatgtggagccaggccctgcaaacctatcgctacctgcgcgaaaaggtcaatcgcggtgaacttcagctaccggagcgcgcgcgcggcaccaatacgtttggccatttgaaaaaacaggctcagcaaaaaaacccctaaccacccgtgaggatccatgatgactagcaccctgaaaaaaatctcgcgccatgtcgcgcttaccctcgccgtcagcgcctgtttttcccctgtcacccaggcggcggaactgctgaccgagggcgtctttaaggtgggaatggaggtcacctacccgccgtttgagtcctatgacagcaataacaatatcgtcggtctcgacccggagtttgccgcgctgatcgcccaacatctgcaggccaaaccgcagctgatcgacaccaagttcaccagcctgatcctcggcatcggcaagaaatatgacgcggtgatctccgggatgtacgtgacgccggagcgccagaaacaggccgacgccatcccttacgccctctccggcgcgtcgatcatcgccctgaagggcggcgcggtgcagccgaaaaccgaagatgagctgtgcggtgtgaaggtcggtctgcaggcgggcaccacctgggtgaccagcctgaaaaaacactccgatgagtggtgcctgaaaaacggcaaaccggccatcaccattcaggagttcccgacggcgccggaagcctcgcaggcgctgctgtcgaagaacatcggcgctcagcttgagattgccccggcagcgcagatcatcgtcgacaagagccgcggccgcctggcgataagctctacgcgcctggtctacccgctgccgctggggatctacgtcgccaaaggcaacaccgagctggcggaggcgatcaaggccgccctggccacgctgaaggccaacggccaatatgccgcgttgatcaaaaaatacaacttagaaagcatcgattaagacaataagcactgcgcaacaggagtcagtatggcgttcgattggggatactttttttcattgtttagcattggggcattctggcaggcgtgcgtgaccgtcatcgtaatcagcaccttgtcctgggggatcggcctggtggtcggttttctgttagcctgcgcgaagctctcggcgccgcgctgggtcaagatccccgtcgaactctatatctggttttttcgcagcgtgccgctgatggtgctgctggtgtttgtctacaacctgccgcagctgtttccggtgacccagccgctgctcggggtgccgtttatcgccgggctggtgtcgatgaccgtcaccgaggcggcctatatggcggagatccaccgcggcgggctgctgtcggtggccaaggggcagagcgaggcaggccatgcgctgagcttcagctttatcggcatccagcggctgatcgtgatccctcaggcgtttcgcatctcgctaccgacgctgatcaatgaatacatcaccatcattaagctgagctcgattctgtcggtggtctccttacccgagctgctgctcaccggccagcgcttgtatgcgcagaatttccttgtgatggagaccctgctggcggtagcggtgtactacgtgatggtggttaccgtcttcacctggctgttccgggcgctggaaaatcgtctcgatattcagcgtaagcgtccgcaaaccctcagcgaggcggaatgccaggcgctgcgccagagcctgccggcgctgacggaagagatcaaaacgccggccgtcaacggcgcgccgccagcgctcgatctgcggggcattcgcaaatcctggggtcagcatgaggtgctgaaaggcatcgatctgcaggtggagaacggggaggtgatcagcatcatcggcccgtccggctccggcaaaaccaccctgatccgcaccatcaacgccctcgaaagccttgatggcggggagatcattctctacggcgaggactatctgaagggcggagccatcgtcgacaaacgccagatgcgcgccggggtgcggcgcatcggcatggtcttccagagcttcaacctgttcccccaccgcacggtgctcgacaacgtgatgctggccccgcgctatcaccagctgcttgaccagccggtcgcccgcgagcaggccctggcgctgctcgaccgcgtcggcctgctggcccatgcccacaaataccccggacagctctccggcggccagcagcagcgcgtggcgatcgcccgggcgctggctctgaagccggacattatgctgtttgacgagccaacctcggcgctggatccggagctggtaggcgaagtgctgaaggtcattcagtcgctggcccgcgaaggcatgaccatgctgattgtcactcacgagatggacttcgccctgtcgatttccgaccgcgtggtgctgatggagaacggcgtggtgcaggccgatatcgccccgcaggtgatccgcagcccgctagaggccccttctctgcaacgaatccgtgaatttatgggagtacgctaaatggcaactgagcaacacctgcgccagcagttggccgccgcctaccggctggcggcgctgttcggctgggaggataccctctacacccacttctccgtgcgcctgcccggcgatggcgagccgcgttttttaattaaccccttcggcatgatgtttgacgaagtcaccgccagcaacctgatcgtggtggatatgcagggcaaggtcgtagcgggcgacgcgccagctaactcggcgggctttaccatccacagcgcggtgcatatggcccgggaagacgcccactgcgtgatccacacccatacgctgccgggaatggcggtggccgcctgcgaggatggcctgctgcagcttaaccagatcagcaccgagttttaccagcgcgtcggctaccatccctatgaaggggtggcctttgacctcgacgaacgggcgcgcatccagcgctcgctggggaataatatcgccatgatcctgcagagccacggcctgctgtcggtgggccgcaccgtggccgatgcgttttacatcatgtactacctgaaccgcgcctgcgagatccaaatggccaccgcccagctggcggccctcagcccgatccacaccatcgctccgcacctcagccagcacgcctgcgagcagctgatgggcgtggagcatgaacgtcaacaggtctggcaggcgtggctgcgccgtcttgaccgtctcgatacctcttacaaagactaacgcctatgtctgatatcactatcgtggtggattgtaacgacgcggatttcgcccgcgatatctgcgccgccctgcagcagtttcccgacgtcacggcgcttctgccccatcaccaggcggcgcgcgacgcccagtacgccagctgctggttcccggacccgcagctgttgacccgttcgccggggctgaagctgatccaggccgcgtccgccggggtcgatcatctgccgcccgcgctgttcgccagcgagatcccgctgtgccgggtgatcgatgaagattttcgccacggcatgttcgaatatgccctgtggagcgtcctgtggtttcagcgccatttcgaccgggcgctggcccaccagcggacccaaacctggaagctctatccccagcgcgccgccgccgacttccatatcggcattatggggctcggcgaaattggcggctatatcgccgaccagctggcccgcctcggctatcgggtctccggctggtcgcgcagtgaaaagcagttggctggcgtcacctgctatcgcggcgaggaggcgctcgacagcttcctcgggtcgcttgacgggctgattaacctcctgccgctcaccgcgcagacccgaggtatcctcgccgcgccgctgttcaaccggctacccgccggggcggtgttgatcaattgcggccgcggggagcatatggtcaatgaggatgtgctggcggcgctggagagcggccagctcgccggggcggtgctcgacgtcttcccgcaggagccattgccggcggacgatccgctgtggcgccatccgcaggtggtcatcaccccgcatatggcctctgcggcctctgccgaggtgatcgcccgccagctgctggagaacattcagcgccagcgccgcgggctgccgctgaaaaacctggtcaataagcacgccggttactgatccccggctatatcgccgctgctacgcttaataggagatccacaaccagaaggcaggaacatgaaaattgatttagcgggaaaagtcgcgctgatcaccgcctccacggcgggtattggcttcgccatcgccaaaggcctggcggagagcggcgcagaggttatccttaacgggcgcagcgagcagagcgtgaacgccgcgatcgcccggctgcaaaatgaggtgccgggcgcgaaggcgcgccccgccatcgccgacctcagcgacgccgacggcgcagcgcagctgctgcgggccgtgaccggtgtcgatattctggtcaataacgccggaatctatggcccgcaggatttctacgccaccgacgacgcgacctgggacaactactggcagaccaacgtcatgtccggcgtacgcctgtcgcgggggctgctcccggcgatggtcagtaaaggctgggggcgggtggtgtttatctcctcagaatcggcgcgcaatatcccggcggacatgatccactatggcgtcaccaagaccgcgcagctgtcgctggcccgcggcctggcgaaatatgtcgccggcagcggagtgaccgttaacagcgttctgccagggccaacgatttccgacggctttgccgaaatgctgaaagacgaagtggcgaaaaccggtcagtcgctggaggaactggcgaaagcgtttgtcatgacccatcgtccgagctcggtgatccagcgggcggcctcggtggcagaggtcgccaatatggtggtctacgtctgctcgccgcaggcgtcagccacctccggcgccgcgctgcgcgtcgacggcggcgtggtggatgatattctctgaatcccctttatgcaggggagccccctcccctgccgccttcccgggcgctaaaaagcgcaaaatgttaaaaaacagccgcaaagtcgcacaaagtgaacaggaacatgtattcccagaacttatgatatttgttttaagcataagttgtggtgttaatgtctctgttacgaagcttgcttttctttttcggcgcggcggtcgcggccgccctcgcggtactctgcctgtgggtggatattcgggtgtttggcaacgacatcccggaggtgtcgctcaccgaagtggtccaggagagcgtgctggccgttatcgtgctggttcatctgctgctggcgcggaaatatgcccacttgcgctatagcaatatcctcatcggcggcttctttctcgccatgctgatccgcgaactggatggcctgtttgatttactctcccacggcagctgggtgtggtttgccctgctggccaccgcggggtcgctgctgttgccgttgcgccatctgcgtaagactctgtcgcagctggcggcgtatacccgcacgccctattacgggatgatgatcagcggcctgctggcgattctggtcttctcgcggctgtttggcatgcacggcctgtggtacgccgtgctggaagagaactacgcccgggtggtaaaaaatacggtcgaggaaggcagcgagtcgtttggctatatgctgtgcctgaccgccaccctgggctacgcctgctactttcgcagtctggcgcaacaggcactgtcgccgcagcgctaatcgtggacgatagccaccgccgggcgtgtctgctggcggtggcgcgccgccgcggttaaccgcgaattttccacttccgtttgagaacctctttgtcctggctatccagccactggttcactttctccagcagcgccgggttatctttactcatcatatacaccttgttgctggcggtgccggcgaacggtgtttcgttagcaacgcagaacacgccgggctctttgctctggtaatagtcgccttcaatcagatcggtcaccatcatatcggccgttttctgccgcagcgcctgcaggttatcgacattgttctgcacgcggataatttgcgcctgcttgatgtgctcatcgacaaagctctggtttgtgccgccagggttgacgaccactttcacgtccgggcggtcaattttttccagcgaaccgagccgcggggcggcctggcagttggctaaggcgatttttccgttcgccaccaccggatggctgagggcgaaggcttgcgcccgcgccggggtctcggtaaccccacccatcgcaatatcaaacttgtccgcctgcagatcggcggcgagcgcgggccagctggtgtagacgaagctcaccttcagcccgagcgtgcgcccgagatcgcgggccatgtccacgtcatagccctgcagttcgccggcggcattgcgaaacgccagcggcgcgtaatcgcccggcacgcccaccttcagttcaccgctgtgctcgatggattgcatattgcgcgcctgggcgccgcaggtcattatcgccagcgtcagcgccagccccaccgtcagtctcatttcgccatccttaaagttatcgtttttcatgccagagtgaccggccgcatcagtcacagtatccgccgcgcgagccagggcattcatcctatttttaaacaccgggacatacaacccgacgtggggcaaaacgttaattaatcctctttctcgctgtgagcttgctggttgttttgactttcagtaaaatgccccgcagcgcattcatattttattcctggctatacgtttaatatattatttattatcgtttattttacttttctcttatgcgttaatagttgaatcttaaattataaccctctgattaataagtaaaaacacttcatgcaacaactttcgttaggatttttctaatgatcgtgcttatcatcttatttactcccctcctctccagcagtaatacttggttacagaagcagtgtataaggaaatacattatgattattatcatttccgccaataaattttttattaacggcatccggtctctggttaacatgaccatgagtgctcaacgtcggtatagtcaaacattgtttctggataatatttctgacgtgaatgataaaagtctaaccatagccagaaccattatcgtggactatagccacccggacattcaacaattagccgcactgctctatcgtaaaaaaaagatcattcatggcgatatcgtttttgtcgttaaaagtgagattcttgccgatccagtcgaaaacattatcataaactctatttcgacgatcgtgcttgattatatagatgttacccaacgactgcagaaatacttacagaatgcgtctgatcaccgctgtattaaagtgttcagaaaatcaattagctcgctggacagtcgtgtcaatattaaacttacgaaacaggaggactctcttctcccctatatcatctcaggtttaaataataagaaaattgctcaggccaccgaccttagcaatatgatgatcagtcactatcggagaaacatctaccagaaactcaatgtccgcaatattgcaggcctgtatcatttcctccactccctggaggggggataagttcgctttatggctatcacaacaacagagctaacggcttatgcagcgtcaatgagtatgcctggctattagcttcccagggtcacaacagaaggaattggctatgaaaatgaaatcactttgcctggcaatggtactcgtcggcttgacctcacactatgcctccgcggcggacggtacgctgtatttttcaggtacaattgtcaactcaacttgcaaactggcaagcggcaatgagaagggtctcattgaagttaagatgggcgctgttccgctgtctaaattaaaaaatgataccaatggcaccgggccagaagttggggtcaatattagcgtcaaagattgtgaagcgggcacgtactatattgtgctcgacggtgcttcagccaacgaggcgcctatcactaacgtactggctctcgatgcgggtaatcctacagctaaaaaagtcggcattaagctaaccgaccgcaataataccccggtcacgctcgataaacctttcgatcccaacgtcgacccgcgtattacggtcaatgccgatggcaccggtaccttcaacctgaaagcctattactatacctgggataaagacaacgccgaagctggcgacggcaatgcgaccgccaggtttaccattatacagcaataacgcctggccagggacggcacgacgcggataaggggtaagatatgaaaacgctgctggcagtgatcataggcgctttggcttttcagacccaggcggccattaccatcgatgcctcacgggttatttattcgggcaaagataaatcggccagtctgaaaattaacaaccgaagcagcaaaaactatatcgtccagacctggcttgatacgggtccggagacccccagcagcggcttacccattgtggcaacgccgcccctggtcaaattacgccccgagcaatcggcacaactgcgctttatttactcaggaaccggtcttcctgccgacagggaaagtctgttttgggtgaatattcaggaggtccctcctgcgcctgaggaaaataatatcctgcagttcgcgattcgcacccgattaaaactattttatcgcccgcaagggattgccacatcgctgcccaaagccgttgaaaatctgcagtggcagcaaagcgctaacacgttatcttttactaacaacagtccactgcatattacggttattaatgccgaggcgatcgacaacaaaggcaaaatctatcctctgaaaaactttatgttgctgccgtacagtcatcacgctgtcaatatcgccagcatgcagcgcttgcataaaatgaaatatattaatgattacggcgccgttgttgatattccaataaaaaaataaacgtcgcacctctttagggagatagagtgatggacgatagtaaattacgctattttgccagcgcatggttaatctccatcacgttaccggcagacagcgcggaacgctataatgcccagtttgtgaacggcatcgacccgctggcttttaatcagtttgtcgccagcgatggcgacgtcatgccgggcacctatgacgttaatatttacattaacgatctgctggtggatagccgccccgttcgcttctcagaggatagcgcacacggcgggttggccccctgcctgagcgcggcggaatatatccgctatggcgtcaagattgacgatgaccaccagccctgtttcgcgctgtcgcagacgatccgccaggcagagcaacagctggatatcgctaatcatcggctgatcatacatatccctcagcaatatattgagcactatcctcgcgactatgtttcccccatgcgctttgatgaaggtattaacgctgctttcgtcaactacagctattctaccgatgccaataatggcgacgggggcagccaccagtaccaatatctttcgctaaacagcgggatcaatattgcatcgtggcgattgcgcaataatgcctactggaataagttcagcggccaggcggataagtggcaaagcatcgccagttgggcggaaacgaacatcattccctggcgcagccggcttgtcgtcggccagaccagtaccgacaacagcgtcttcgatagcgtccagtttcgcggcgtacagcttggcaccgatgtcgaaatgcgccccagcagccagaccggcttcgcgccggtcattcgcggtgtggccaacagcaatgcccgggtggaagttcggcagaacaactatctgatttacagcgagaacgtcccagccggtccctttgagctaaatgatatcagcgccgttaaccgcagcggtgatttctacgtaaccgtcattgaagccgacggtagccagacgacctttactgtcgcctacaccaccctgccacagctggtgcgggcaggccaatggaattatcagctgtcggcgggtaagtatcatgacggtgctgacggctatgcccccgccctgatgcaaagctcgctctcttatggcctgaataataccttcacactatacggtggcgcccttgccgcggagaactatcgcgccggcgcctttggcgtcggtagcaatctgggggagattggcgccctctcagccgactatacgctggcgggaacgacgctggcgaatggccagcgcaagcagggagggagcgtgcgttttctgtatgctaaatcctttttatcaagcaagaccgactttcaaatcgcgggctaccgttactcaacggcaggttattatagcctcagcgatgcggttaacgagcgtcgacgctggcacaatggcctgtacgaaaatgattactggccctctgacgaagacgaaagctggcaggcaagcgctccccaacactattacacgtcctggttttataataaaaagcatcgctttgatatttctgcccggcaaactctcggtaagaacagcgctttcttccttaacttcagccagcaaaattactggaatagctcaggaagcgatatctcgctgcaggcgggctttaacagcactatccataacgtgaactatggtctgtactatcagaatacgcgcagccacttcacccatgacgacaatagcatcacactgcgcgtttccatcccttttactctgcaagaaaaccgccggatcaataccgcatttaccctcgcccacagtaaatcgtctggcacgtccgggcaggctggggtaaacggcacgctgctcgatgatggtcgcctgagctgggccgtcaccagcgcctatgatgacaccagccatagcaccaacagcgccagcctgggttatctcggccagtacggtaatctgtataccggttacgcctacagcaaaagccatcgtcaggcgagtctgaatctgagcggcggcgtggtggcgcaccgcggcggcgttaccctctcgcaaccgctgggctcaacctttgcgctagtggaggccaaagacgctcagggggtagggatagagaatcagaccggcgtgcgcatcgatcccttcggctacgctgtcgtaccacaaagcgttccctatcgggtcaattctgtcgcgctcaaccctcaggacttcgatacctttcttgatgtccctaacgcggtagcggataccgtgcctacccgcggggcaatcacccgggtgcgctttgatacgttccggggatatagcgtgctgatccataccaccctcgccgacggcagctatccaccattgggcgcacagctctatcgcgccagtgggatcagcaatggtctggtcggcccgggaggagaagtttacgtcagcggagtcgattcaggcgaaaagctgcagatgaaatggggcgaaacgcaccagcaaagctgcgaaatcaccctgcccgaactgcgccaggagcctcagcaggcgacggcctggcgtgaattatccttaatctgcacagtaaccccctcgaggtaattatgcgccgacttagcgatacgttatttctgacatggctttccgttctgttcatgctgagcgccttcccggcgcaggcgctgacctgcaagaccacctcgtccacgatcagcgaagtcgtgaatatcgagagcatcattaaagtctccagcagcgagcttattgccaataaaaagatatgggtctccagccctattaccgccaccttcagttgcgaagataccgataattttccgaacggtgaaagcgcctatttctggctggatccggaaaataaagccagcagcttgcccgactttatccaggtaggcattacttacaacggcatcgactatctgctacaaaataaaaaatcggtggagattggcccggcgacgctgtgtgataaaagcgggaatacctgtaagtccccggccattgggcagacattcagcctggtttaccaggtctatatcatctcgacgggccgcagagtgaccggggaaggtaaaatagacgataacctaaaattgtcgctttttcaggtagatggccaaggcggtctacgcaacggcaccgctggcgccaactataatcttttcattaccggcctgaaccgtatcagaacaatggcctgcgtccccacggtatctatttcgccaagcgaaattaactttggcgatattcctgccggtaacgcccgaccgggctactatgaaaaaacacgcccctttaccgtcacctatggtctggtcaagcagggtaacggcagtgattgcgggaccgaacctatgcttgctacgtttagcaccactaatacgatacaggagagcgccattattttgccgcagccggacagcggcttcggcattgccatctcgccaaacgccagcatgcatccccttattgagatgaatgctccgattcactttacgctggcaacgggcgcgaccctcgcgagcacctatacggcggggctgctctggttgtcgagaacgccgaagctggggcctttttccgcgaccgccaaaatcaccgtgacctttgaataacgccgccccaggctagttatactccagggcgaaagtcaccatgctgttggccgtaccggctcccaccgtggcgtcagtctgcacatactgggcgttgaaattgatcgcctcggcggtaccggcgctggcgccggtcacccttttcaggatcggcaagttgctggcctcattgatcttaacgctggtgccgtcgggcactgccgcaccggggttattgccgtaggtcagcttcacgccgacgccgctggcgctgttgctggcctggctcagggccagggtatcgctctccacgctgacgccgaaaaagccgatgcgcacgtcggtcggcgtcggacagaagaccggaatcgaaaagcgcttcgcctggccgccggtagtccctttgccatgaaactccccccggttaaccgtacccagactgacctggatcgtcgatgtcgctacctggcagctgccgctgctgccaatgtccacattcagggcggcgatatcgatgctgaccggcgcgctggcgacaaagctggcgcttgcgctggtctgctgttcaatggtcatctcccccacctgcggcagcggcggcgagttggtatgcgtcccgtccgccagttgcaccgttccggttttatagaaggttaccgcaatcctcaccgtggtttgctgctgcgtcatcagcgccgggagcgtcgcactgtcgcatatcaccaccgactcgccgccggcggagtggctgccatcgacggcacgcatcgggccgccggcgcactggaagctgagggcgtaaccaatgccgtcgatagcgctggggtagacatgctgtccgttaatcaccatcggcgagccgccggttttcagctgcttatagacgatgcgtttggcgctcgccgtcggcagctgcaggtcgcaggaaaaagggatcccgctgccgttatccgccatcgcgctggtcatctgggtattgaccggcagcgtgggtaaatacttgatattaggaatattgaccgtggtctggccgatatttgcgcggcaggtttcagcccgcacgccgggaagataggcgctcagccccagcagaaagaggaaaggaagtagacgaaaaacagatttcatagccgcctcagcgtgtctggcacagtccggagacggttttcaccgtattcagactctgctgtgggttatccggaagatgaaaatgcagcgtgcagctctgcgactgattgttgacgatccaactcaccgccagggttccctcctgcggcacgccgctgagatacacctggccgccgtcggccaccataccgcccggcggattgccgctctcctcctccttgaccagccgcgcactggcgccaaacggtagcggcccctgggcattgcgcagggtaaacagcacccggttgccaatgtgggtctggtagttggccatcaccaccgcgccgccgccggggatcacggtctgcccctgctggtcgacgtcggtgtcgtcggccatcgactccgtatcgagggtaatgacatttttccggtaggcggtcagggagggcaccacggcatagccgcgccagtcggtgtgcacattgttgccgttttgcaccgccacgccggcggcccccggcgcccggacgatggcgaagctctcacccaccgtctggccgaaggtgacgccgtgcggatgcgcgaccaccgagccggcgcctccccaggtcaactggttgctggcggcgtcatggcgatagccgatctgggcgttgccgaagccgccgtggtagtccagggaggcgctgctgttgctgcctcgtccctggttgccataaccttgctgaaccgagtagaacagatttggccgcgtcggcaccgcgccatacagcgacatctgctgcgaggtatagccattgctgtccgaggtggtgttgtagctcaccgcgctgtcggacagcggaccacccagcggaatattgatattgaatgaccaggagcggtcatttttttgctggccgctggtgcgggtgtagtaatagcccacaccccaggagatccctttccaggcgctgtagaacccaaggtgcaccgtctcatcccgactctgccgatgccagtactcctgcgaccaggcggaaaccgccagactgcccaggccaccaaggctttgcgacaccgacagctcttcccggcgacgccggttgtctacttgcccctgggcgctttcaagggcgctggcttcggcaaaatcgtaatagccgcttgacgagtagcgatagctggcgaggctgaacgcagtgcccgagctgacaaaatttttctgatactgagcgcgcagcgaatggcccgtatagcgcttgcccgacggcgtacgggtgacggcctgggtgacatcccctcccagcgatccgaactcgccaaaaccgcggcccaggcccagcgcccacgcctgatagtcccgggccagctgcgtaccaccgtagagggtgaatcccgccgtcaaaccgtagtacaaagtgccctgcagaaattccggcgagcgcaccgactcccccccggagtggtagcggccggcgctgagactgaatttgccgcgcccttcgcgcagcatatatggcaccgcggaatagggctgggtaaaggtacgcaccgcgccattgctctcggtcaccttcacctccagatcgccgctctgcgaggtggggtagagatcgctgatggcgaacgcccccggcgacacaaaggtctcgtagatcacatacccgtgctgagagacggtcactttggcattgctgtgcgccacgccacgaatggtgggggcaaagccgcgctggctgtccgggagcatttcatcgtcagacatcagctggacgccgcgaaactgtatgctgtcaaacacatcgccggtggtataggtatcgccgatccgcagcaagctcttcagcgagcggacatcgcgctgcagccaggtgctctgggtatcccagtgccggcgctgctggtcatactgcattgaggagatgttgcgcagtcgccaggcgcccaggttgaggccgctgcgtaaattgagatagtttgagcggctgctctccccttcgtcggcgttctttatttgcgcgccggaaaaatagtaatcgacaaacgcggccggcacgccatcgtcccagcgcgacggatcgacatagccgcggctttgcacgttcatcgccgcctggggaatactcagcgtcaggcgctggttagcgaagctgaaccgactgctggcgtcgggaataaacttctcgatccgggtgaaggtttcgccttcatgcagcgcttgaaaggcgggaaacgcgctgacgttgacgccatactccgccagctgaccgggcgtcagcaccgggcgcagctgcccgccatcgtcaacaaacgtgatatcagcctgacccagctcctggtcattaaccaccacggtgacaggataagtccccggctgctggccgccgggtttggcgaagtagtgcagatcggaggtttgctgctgcgggtcagcaaactccagcgccgccgggtcaaaatagtcgtcggccatcgcccggctcaacggactgagacaaaacatcatcgtcggcaccgtcgccagcgccaccgcccgcccggcggtaacgggcaacaaggcatactcccgcaccctggctgttgttattcttttcatgctggcgccgtccggtaagctcatcaaaaaggggaattactgctgggcgaaatcgctgacgccgccgtagtcgttaatcgcccgccatttgacggtgccgtgcccgctcaccggccacgttttctcgccgaagggagccaccatgccgggatcgtcgatgctttgcccgcccacttcgacggcgtaaaaagagacgaagtagggagtgggatttatcaccgtcagccgaccgccggactggctaaacttcagctgctgccaggcctttgccgggtcgcccgccaggtcgttggggcgatagaagattttgaatttcgatttaatattcacctgcagcttattcacctcgccctgaggcgtcggggcgatacttttgacgttcagccagaagaccgattcacggtcgcggggcagcgaggcgccaataaagttaatccgcagaacgttattttgctccggatcgagacggaacaagggcggcgttacaatgaagggcaccctggccttatcgttttccgcgtaattttccacccacgactgcaccagatagggcgtatgggtatcggcattggtgactgaaatagcggcttcacgcttcccttcctgataaatcacacgggttccacccatgacaataccggcctgcgctgccgtggtgcacagcagaaaagccgcaacggcaattattttcttcatcatgacttaccatcaggtaaaagttgaacagacaacaaaataaagcagtgaataacagagccagtactcgacgggataattagcaaaaacaactataccgtcacgaatatatttcgtgacttcatgacaattaacactttagctatctgtaattaatcaagacgcagtgggctgactctgaataacgcgcaattagatcagttataaatcatattgaaattagctgtaccgtcggctttacctgccgtcacggtcgccgcggtggagatatagtcggcgtaaaattcgaggtcggcagagccggtgccgccgctggtacccggagtgaccgtctgtttggctgacgttttaccgaggctgacagccgtcgaccgatcgtgctcatacagcttaatcgctacgccgctggcgccgccgttgatggccagcagggagttatcagactgatcgcgcgcgccgtcaaacagcacggcgaccgtagtcacgctggccgggcaatctttcactttgatatggaagggggttttggtggtttcaaaaccagtgccggtaaaatagttgctggcccatttgcccagatcaaccttctggccattagaactactatcgacgttgcaagagctgtcggtgattgacccattgaagatgacctgcccgccggcgccttccgaactggtgcccgagtcaggattgatagtgttggccgcggtagcctgcaaggctacgccagaaagcagcgctcctatgaggatggttataaagcgaggttgttttttcattatttatctcatcgttaacgaacatattttccatcatcgacaatagccctaaagctatcgcgaaacggctcgtcagctcctccctgtaaatgtacgttgcgttccttccgcaggatattaggcacatccccctctactctgccttatttcgccaatagatggccatgaataacaaacagaagaaaaaagagttattttgatgtgcgaaataaatatattacccgaagtatcaaaaggcaacccgggaagatgttaactataagttaatagctatgctcgccatatatttaatttttgaaatggcttttcaatgttaatttacatatctatacaaaagaaattcaaatacctttaaacaacaacagatcaattcaattaacaaatttaaagacaattgttcaaaaattcgtcttgttttattgtgcgctcgtcagagcgtacacaaaaattaggaattttcctggtattaatattcataatttctacacaaacgacgccagggtgcgccacctccacccgctaatcccttattttggaagtttttttattttcaagtgaaagccaatacataagtgacataaatacatgggcgctgccgccggcaaaataaccaccctcttcgaatggttattttgaagttaaaaaaaatccgcaacccgaatggattgcggactgaggattggtcagaaatgagatggacttcagaacaggcccagcggcgcggtgccgtagctcaccagcaggtttttggtttgctgataggcatccagcgccatcttgtgcgtttcccggccgacgccggactgtttatagccgccgaacgccgcatgcgccgggtagacatgatagcagttggtccacacgcgaccggctttaatgccgcgacccatgcgataggcgaggttggtatcccgcgtccacaccccggcgccgagaccaaactgggtctcattggcgatagccagcgcttccgcttcgtccttaaaggtggtcaccccgatcaccggcccaaagatctcctcctggaaggagcgcatatcgttgcgacctttaatcagcgtgggctgaatataaaagccattatccagcgccggcgcgatagccgcccgttcgccgccggtcagtatttgcccaccctcttcccgggcaatctgaatataggagaggatcttatcgaactgctggcgggaagcctgagcgccgatcatggtgtcggtatctaacggatcgccgcggcggatctgcgccaccttctccattacccgtgccataaagggctcatagatggattcatggatcagcgcccgcgacgggcaggtacagacctcaccctggttgaagaagccgagcaccagcccctccaccgccttctcaataaattcctcttctccgtccatcacgtcggcgaagtagatgttgggcgatttcccccccagctcgacggtgcaggggataatattttccgccgcgcaggcgagaatatgccgcccgaccggcgtggagccggtaaacgccagcttggcgatacgcttgctggtggccagcgcctcgcccgcctctttgccgaaaccctgcaccacgttaagcaccccggccgggaacagatcgccgatcagctccagcagcagggtaatgcttagcggcgtctgttccgccggtttgagcaccacgcagttccccgccgccagggccggggccagcttccacgcggccatcagcagcgggaagttccacgggataatctgtccgaccacccccagcggttcatggaaatgataggccaccgtggtttcgtcaatttcggcggtactaccctcctgggcgcgcaggcagccggcgaagtagcgaaaatggtccaccgccagcggcaggtcggcgttaagcgtttcgcggatcggtttcccattgtcccagctctccgccaccgccagatattccagatgctgttcaatacgatcggcgacctgcagcagcagcctggagcgctgttgcactgaggttttaccccacgccggcgccgcgcgatgggcggcgtcgagggcgaagtcaatgtctctggcatccgagcggggaaactgcgcaatgttgctgccgtcgaccggcgaagtattcataaagaattcaccgctcagcggctcgacaaatctaccgtcaataaagttgccgtaagccgatttaaatgaaaccacggcgccgggctggccaggatgtgcataacgcatcgcaaatctccttctgtagggttgagacgcagcggcatattgattttttaaatttgccgccgaacgcttctcactgtgcaggggttatgccagttttttattttctttaaatatttttatttattaatacgttgccttcactaaccgagcagatggtcagccatctgtcgcacgggtttccacttatgtgttgcaaatcgcaacaccaaataaaccaaatggctacaatattgcaacacagcaacatcgacccagaggtgccctgtggcaggcaatccctttcttctcgcaccagaggttaatgcgaatcccctgctgagcgattcgtggtctcgctgccagcgctacgggctggatcccgccaccgaggattttccccgcctcggcgccggcgagctggcggaccggctcgccagccaccgcggcctgcagcagctggcgcagccggtggtggaagccctgtcgcgccaggtcgcagacctgcagtcggtggtgatcctttccgaccccgacggcctggtgctgcatactctcggcgatacccaggcgctgcaaaaggcccagcgcgtggcgctggctcccggcaatctgtggagtgaaagcgggcgcgggaccaacgccatcggcaccgcgctggcgattgacgatggctgcgagatcgatggccgtcagcactttcttacccgcaaccagaatctgtactgcgcggcgatgccgctccagcgaccggacggaagcatcgccggggtgctggatatctccggcccggcgaattttccccaccagcacacctttggctgggtaaaagcggcggcaaagcaaattgaatatctgtgggtgaaacagagtatgcatcctgagcagtggctgatgagcctgcaccggcaggtggacaaactcgacagcgtcgaggagctgctgctggtcttttccgacaacgtcctcaccgccggcaaccggctggcgatgcgcgagttcggcctgagcgcggcgcagtttggccagctcacctttgcctcgctttttccgacgctgacgcaaacggcggtcagcgtcccgctgccgctgaccacgccgcagggccgctaccattatcgcctgcgggcgcccacccgccgccgggtggcggtaagcgccccgccggccatgcatctcccctttaccagcccgcgcgaaggcgaaaagctgctgcggctgctcaacgccggcatcgcgctctgtattgagggggaaaccggcagcggcaaagagtatgtcagccgcacgctgcatcagcacagccgctggcgcagtggcaaatttgtcgccatcaactgcgcggccatcccggaatcgctgatcgaatccgagctcttcggctaccagccgggggcgtttaccggcgccagcaaaaatggctatatcggtaaaatccgcgaggctgacggcggggtgctgtttcttgatgagatcggcgatatgccgctggcgctgcagacccgcctcctgcgcgtcctgcaggagaaagaggtcgctccgctgggcgccagccgcagcgtgccggtgaatttcgccttgatctgcgccacccaccgcaacctgacccagcgggtcagcgccggagaattccgtgaagatctgctgtggcgtctgcgggaatacgccctggcgctgcctccgctgcgcgagtggccggcgctggaaacctttatcgccaccctgtggcacgacctgggcggtgcttcacgccgggtgacgctttcaaacgcgctgctggttcacctcagccagctgccgtggccgggaaacgtacgccagctgcagagcgtcctgaaggtaatgctggctctcgccgatgagggcgacacgctgacgcccgacgcgctgccggaggcttatcgcgccgcgcctgcgccgttgccgcgcgggggattgcaggcccatgatgagcagttgattgtcgataccctggccagggtcaacggcaacgtcagccgggcggcgcagatactgggtatcgcccgcagcacgttgtaccgccgtgccgcccgtgccggacggcctcgtcgctgaggctatggcgtaaagcgcgccggtagcttgcacgctgtcggaaaacctccgccgccatagatggcggttatttctctctgcgctaaccaggtgttgcggtaagaggtagcccttcccgcagggcatcgatcgccgcccgcgttttttgcggcagccacggcccctccggccataccgcgtggatggcgaaacgcacctgagcgctgggcgccaacacctgctgcaatgtcccatcggcaagcgcctgcgccaccagccagtccggcagccaggcgatgcccatcccctgctgcactgccgccgcgatggcggcaaaatcatcctgtatcagccacgtctgcggactgaagcgcacttcgccctgctgcgggtcatacagttgccatttttgcagctggccgttgtgcagatagccgagggtacggtgctcgttcaacccggcaatagtctgcggcgctggctgctggcgcaggtactccgccgccgcgcacagcaccataccatgctctcccagcgcacgggcccgcagcgacccggtatcggccaggctcccgatacgcaccgcaagatcaaacccctcctccagcagattgacctgccggtcgctgtagtggagctcgagcttcagtaacggatagcgctggctgaggcggaacagcagcggtgccacgcagcgctggccaaacagcaccggcagcgacacccgcagccgcccctgcacctcatctttgccgcgctgcagcgtctcttcggcctcgcggatgcgctccagcgcttcccggcactggcgatagaattgctccccctcttccgtcagcagttgccgtcgggtggtacgctggaataacgccacgccgagacgcgcttccagccgggcaatggtttttcccaccgccgaacgcgtcacatggaggatcgccgccgcgctggcaaagttgccgctctcgaccacggtgacaaataccgggatcgcattcagatcgtcgcgcacagattggttccttacgggatacaataaggaaaaataatgtcactcctgagacaaaaaagacagtgttagtctttgcttctatctttcatttgaggcactcatcatggctaacgttctggttttaaaatccagcattaatggcgaaacatccctgaccaatcagttgattaacgaatttctcgcggcgcgccaggcggcgggacacggcgatcggctcatcgaacacgatctcagcgccatggcgctgccaacgctggatcgccccctgttcgccgccctgcgcggggcagtggatccgcagcctgctatccgcgaggcggtcgccctctccgaccagcttatcgccgagttaaaggccagcgacctgctggtgatcggcgcgccgatgtataacctcaacgtcccgaccgatctaaaaaaatggttcgacctcgtggcgcgggcacgggaaacctttcgctacaccgagagctggccgcaggggctggtggagggcgtccgggcggtggtcgtcagcagccgcggcggtattcaccagggagaaactaccgatgccgtcacgccctatctgcgcgcggtactggggctgatggggatccaggaggtggaatttatctatgccgaagggctggacaatcgcccgcatggtcgcgacgccgggatcgccagcgcccgggcgcagattgcccggctcgccgttccggcctgagtcgtggagaaattgtgctggcgctggcggcctttttattttagagttatctaaatttagacaaagctaaaataaatgaccacacctgaagacctgcaggcccgcgccggagaagccgccgcgctgatgaaagcgatgagcaatcctcaccgattgctgatcctgtgcatgctgtgcgatgcgcccagggccagcgccggcgaactcgcccgggctacagggctgagcccctccgccacctcgcaacacctcgcgcggatgcgtgacgaggggctgatcgacagcgagcgcgacgcccagcgtatccactatttcattactcaccctgcggtacagcaggtgatcaatacgctgaaaacgctctattgcccgtgaggatcctatgaccatcgccaccttaactcccgccgagacccaggcgcagattgcccagggcgccagactgattgatatccgcgatgcggatgaatatgcgcgcgaacatatccccgatgccgagctggtgccgctcgccactctgaccagcggtgcgcccctcaatgcccgggccggagagacggtcatctttcactgccaggcgggttcccggacgcagaataatgcgattcgtctggccgcggccgccgcgccggcgcaggcctgcctgctggcaggaggaattcaggcgtggaaagccgcggggttgctggtagtggaagattcatcgcagccgctgccgctgatgcgccaggtgcaaattgccgctggcgtcctgattttactgggggtgctgctgggctataccgttaacggcggctttttcctgctcagcggcgcggtcggcgccgggctcaccttcgccggcgtaaccggcttttgcggcatggcgcgtctgctggcgaccatgccgtggaaccggcgccagggggttaaaacgcgctccagataagccaggcaatgccgccgaagagcagccatttgacgatgtaatagaccgtcttattccattttttcaaccgcttaccaacaatacggatctggtaaatatagcgaaacgcccggttaatcccgccggtgcgatcgccgatatcgttgggcgccgaagcggcgctcatcagatgacgtcccagccagtggttaactttctgcgcccagcggtagcgcatcggccgttcaatatcgcagaacagaatcaggcgattctcaccactggtattttccgcatagtggatataggtctcgtcaaacagcacgccttctccatcgcgccaactgtaacgctggccatccacctcgataaagcagcggtcatcgttcggcgttgccaggcccagatgaaagcgtagcgagccggcgtaggggtcacgatggcgcggcagacggctaccgtccggcagagtggcaaacatggccgctttcaccgacgggatatcgcgcagcagcgcggtagtttgcggacagagctggctggcggaaggatgggcatcctcataccatttcagataaaagcgtttccagccggttttgaaaaatgagttaaacccggcatcgttatatttatcggccgctttaatctgctccagttgctgaaggtggagaccttcgtcgcgaataacctgccagttttgctgcaatatcgccagctcgggaaacatctccggccgcagataaggcgtattcggcacgcgggaaaataaatacataaatccattcagcggcgcggtaaatgtggaatggtcggagagctgccgccagaaacgatagcgcacccgtccgcggtaatggacatacagtacagcaataacaatgatcaacagaatgatatacttcatggtgtctttcctgacctgattggtggtaaccctaccctcgccgtccccctttctcagcagcggtatggcgccagcaaaacattaacaatgttaatacatataactccaaattgttttaacaaaaaacagcacgcccggtgttcagtgagcgggcgttgagctatggtttaggtttatccatggtgttaacagtgaggagtgaattatgtttgctgtcggcgatctggtacaaccccgagcgggcggaccaaaactgaaagtggtggaagtgcaaggggagcaactggtggtggttcaggccgcacaggagcagggagagcgctattcgctgaagtcggacgaggtcacgccgtatcaggaagagggagacttcggcgtctgctaaagcccctcgcttaaagtcgtaaggccaggccggtgggtctctcaccaccgggctggcgctggcccgaaggcgttaaattaaaaagctatccagcgatttaccctgggcgacagcctcggcaatcggcttcggcattcttccctgtccggtccaggttttctctgcgccagtatgatcggtataacgatatttcgccgggcgcggttgacgctttttgcctcccgcctttggcggctgaatatcggccaccagctcgtcaggagaaataccgtcggcgcgcatcagttcaagccaggtattcactttctcctgatattcagcctgctgctgagctgcctgctgctgttgcgtacgtttttcttcagtgacgatcctgagcttttccagcatctcttcaagcacgtcaatggagaattcacgggacagggcacgcagtgaacggatattattcagtttgtgtaacattgaagacataaaattaaaaaattccaaatagcaaattaaaagatacaacgcggcaagtgtaatagaaacgtttatttatttccagccttcggctgtccagataaatatataaggtggatattagcggttatcccctggaactatattggcaaatacctgagcctttttcataagcacaggcaaaaaagagagtgaataaataaaaaaggcagaatgacgggaaaaaccaccgttctcgccaggaatattagctttatggtcagcgggttacctgctgttcatacgtggccgcactgatacatacctttggccacagtgaatagttaatcagaaaatgggaataaaacaacaattcgcaattcagagtttttcaccataaaaacgcgacttacggcataaaaaatcctaaaagagagcggaatcacacactcgcgtgatgttgcgccatggttggctatcaggcgccgttccctcggccagtctcgatttcgcaataaagagtaacacattgataaatattgatatttgcaaaaacaggaataaaagtagcgtaacgaacaaaaaacaaaccagcgcagagtattttatcgacaaaaaggcgataaataaaaatttatagctagttgccacttttaatgcagagatatactctacgcacatcaaaacaggcagcccaaaaacgctataccaacgcgcatttttcggcgttaatgacttcattttcgaggagcactccgatgttctctgcgcactcccgcttgcggcatgcggttgcagacacctttgcgatggtggtttactgcaccgtcgtcaacatgatgatcgaaatttttctctctggtatgacgtttgagcagtcgttatcgtcgcgtctggtggcgatcccggtcaacattattattgccgtaccctatgggatttatcgcgatttcgccatgcgtcaggcccggcgcatcagcccagccaggtggatgaaaaatatggccgacgtgctggcctacgtcacctttcagtcgccggtgtatgtcgctattctgtggagcgtgggtgctgactggcaccagattgtcgccgcggtgagctcgaacctggcggtatcgatgatgatgggcgccgcctacggctacttcctcgactattgccgccgcctgttccgcgtggcgccctatcagcaggcgaaggcctgaccaacgcgttagcagcgactggctctgccagtcgcctcttcccgccagcccgcctcgcctggatccttaaatgcctatcggcgtattaattcgtcgacattgccggctgggcttcgccaaatagcccattcagaaaacgctcaagcgccatgcgtgagctaaatccatgcggaataccataatgttgttgcgcatccccggctaaatacagcggaaactgttcataatgatcacaggttttgatatctgaagccggttcggccagcatattgctgcgctcttttaacgccggatgaataactaacgctgttcgccccatgcgcgcttcgcggttcacataaacataattatcgccgcggcgatagccgtacgctttttgcgtcacaacatccatggtgaagccggctttttcaagaacacgcgccacctcatcgggtcttaaatacatactgattcctcgttatcttttaccgcacattgaccttaccttattcattaaggactgtgctttcggaaaattccagaaaccacgacagtaagcataattcaaaatcttgtcctacacttaactcactcgatggaattaagggagataacgatggctaaccatgtgaaccgcaacaattttgacgagaacgccgaagatattcataacgatgtcagccaattagcggatacgctggaagaggtgctgaaatcatggggcagtgacgccaaagaggaagcggaagcggcgcgtgtcaaagcgcagtcgctgttaaaagagactcgtgcccgccttaatggccacaaccgggtgcagcaggcggcgctggatgcgcgccaggcagcgtgcgatgcgctgggctgtgccgatacctacgtgcgcaataaaccgtggcacagtgtgggcgccgccgccgccgtcggggtatttattggcgtattgctcaatttacgtcgataatagcttaagcgtcggctgccgccgcgcgattggcgcgcggtagcccgcgagctttacggaaggcaatgaagataacaaatacgcgtcagcccctgcgcgcctctggccgcaggggtttttctgcttccccgacttaagcgccatcaaatcgcaatcgcctctctcagccgtcgggcaagtccgtcagccatcgccggcgaacgtatattggtaaaactcatcaataatcccccctcgcccgcgtgcgaatccgccagtcgctcagcgcctgcaccgccagcccggccacaaccgcccgccgcgcgagcagccgatcgtcgccgctgaccgacataaccagttgaattccccccagctgcggcgtgacctgaaagccctgcgcctgcagagccgactccagccactgtctacgctggctatagctggcacgcattttcttcaaatgacgccaaaaatgtccctgctggataaaatccgccagcgtctgctgccacagggtgggaacggtgcaggattggcgctccgcggtctggtgaaaacgcgccaccagcggggtcggcaccaccagccaggcggtgcgcagcgccgggaacatcgacttactgaaggtgcccgcgtagatgaccctctgcggcgcatcaaggcttttcagcggcggcagcggtttgccgtgatagcgaaactcgctatcgtaatcgtcctcaatgatccacgcgtcgcgctccgcggcccacgccagcagctggcggcgtcggggaagcgacagcgcgacccccagcggactctgatgggctggtgtgagcagggcaaatcgcgcctgcgggtgatgacgctggccccagccgacgtccatcccttcgtcgtccaccggaatcgcatccaccgccagctgcccagcctcgacgaccggccggataaagggataccccggatcttccatccacatatgctgtcccggctgcgccagggtacgcaggataaggttcatggaggcggcatagctgccggtgatcaacacctgatccggctgacagtcgatactgcgcgacaggcgtagataatcgacgatagcctggcgcagaagcggatcgccgccgggatcgccgggtgcaagatcgaaccgcgactgcgtccgcagccgacgccccatcacccgcgcccactgcccgcgcggaaagagatccagcgccggcagccccatctgaaacggcagcggctccgtcggcgcggccggttgcactggcggtaccggcgccagctggcgcgggctgagccgctcgctgacaaaggtccccgcctgcccacgccgttcgagccatccctgggcgaccagctctccccaggcgttttcgatggtcgcccgggaaacgccctgctcctgagcgtacacccggctggcgggcaaacggctgcccggggtcagttcgccacgttcaatcgccaatttcaactggcgggcgatacgctgataaagcgggaggttaatcgcttccattatggtctgcttttttcatcacaatatggctatcttttgcagtccattatagtgctattttggctgccgtcttagagaggagaacaccatgaaccaattacgtcagccattcagtgaactgagcccggaagtctataaagggctgatacaggccagcatcgcgctggagaaaagcgagctgggcaacgccctggtagagctggtttatttacgcgtctcgcagatcaacggctgcgccttctgtcttgagaaacatagccaggcgctgcgcaaaggcggcatggcgcaaagcaaactggatgcccttgcgggctggcgggtaagcgcccactttactccggccgaacgcgcggcgctggcttgggccgagtcggtcaccgacattgccaccagccatgcggaagatgaggtttaccagccgctgcgcgaacattttaccccgcgtcagataagcgatctgaccttcgccgtcagtctgatgaacgcctttaaccgcctcgccgtggccatgcgcctgtagttccgcacagcctcccccctcctccgccgatctatcccggcgggggactcgcttgccaaaaacgctatatattgagtggttgaagttttaaataactacatctagtatttccttatcgaatggcccactacgttcgacgctatgtttagcgccgtgctgttatcttaaatggaaatacgaatcatgcgcattattatttacactcgaaatgactgcgtgcagtgccatgccacccggcgagccatggagagccggggactggcctttgaaatggtcaacgtcgaccagcagccggatgccgccgacaccctgcgcgagcagggatttcgccagctgccggtggtgatcgccggtgagctgcgctggagcggcttccgcccggatatgatcaatcgcctgcgcccctcctttacggcggccagcgcatgagcctcatcgtctacttctccagccgttcggagaatacccatcgctttgtgcagcgcctggggctgccggcggtgcgcatcccgctgaacgagcgtgaacatctgcgggtagacgagccctatattctcatcgttcccagctatggcggcggcggcaccgccggcgcggtaccgcgtcaggcgatccgctttttaaacgacgtgcataaccgccagctgatccgcggagtgattgccgccggcaatcgcaactttggcgacggctgggggcgtgccggagatgtcatcgcgcaaaaatgcgccgtgccctatctctaccgcttcgagctgatgggaacccccgacgatatcaacaccgtgcgtaaaggagtcagcgaattttggcaacgacaaccgcagaacgtataaccgccgccgtggattttcacgccctcaacgcgatgctgaatttgtacgacagcgagggccgcatcccgtttgagaaagatcgccaggcggttgaggcctttatggcgacccaggttcagcccaacgccctcaccttccccagccaggaggataagctcagctggctcgtcagcgagggctattacgatccgcaggtgctggccggctatgaccgcgggtttgtgctggcgttgttcgcccatgcccggcgcgctccgtttcgctttcagaccttcctcggcgcctggaagttctataccagctatgcgctgaagacctttgacggcaagcactacctcgaggatttcgccgaacgcagcgtgatggtggccctgacgctggcccggggcgatgaacagcaggcgcggcagctgacggaggagatactcagcggccgctttcagcccgccacaccgaccttccttaacgctggcaaacagcagcgcggggagctgatctcctgcttcctgctgcgtattgaggataatatggagtccatcggccgggcggtgaactcggcgctacagctgtcgaagcgcggcggcggggtggcctttttactctccaacctgcgcgaggccggggcgccgatcaagcgcatcgaaaaccagtcttctggggtggtgccggtgatgaagatgctggaggacgccttctcctacgccaatcagctcggcgcccgccagggggcgggtgcggtctggctgcatgttcaccatcccgatattttacgctttcttgatactcggcgtgaaaatgccgatgagaaaatccgcatcaaaaccttgtcgctgggggtggtgatccctgatatcaccttccagctggcgaaagaagatgcgcagatggccctgttctcgccttatgacgtcgaacggctgtacggcaaacctttcgccgattgcgccatcggcgacctctatccgcagctggtggccgacgagcgggtccgcaagcgctggatccgcgcccgcgacctgttccagcgcctggcggagatccagtttgaatccggctacccgtacatcatgtttgaagacaccgtgaaccgcgccagtccggtggccgggcgggtcaccatgagcaatctgtgttcggagatcctgcaggtcagtacgccgtccgcctataatgaagacctcagctatgcccatatcggggaagatatctcctgcaacctcggctcgctgaacatcgcccacaccatggactcgccggatttcggccgcacaatcgccaccgcggtgcgcgccctgaccgccgtgtccgacatgagccacattcagtcggttccctcggtggcggccggcaacgcggcctcccacgccatcggcctggggcagatgaatctgcacggttacctggcgcgggagggcattgcctacggcagcccggaggggctggacttcaccaatatctacttctacaccgtgacctggcacgcgctgcacacctcgatgcagctggcccgcgagcgcggccagcgcttcgccggcttcgagcagtcgcgctacgccagcggggcgtacttcgacaaatatctgcaggaggagtggcagccgaaaaccgaacgggtgcgcacgctgttcgcccgcgccggcatctctctgcccgaccgggaaagctggcgccagctgcgcgacgatgtcatgcgctatggcatctacaatcgctatctgcaggcggtgccgcccaccggctcgatctcgtacatcaaccatgccacctccagcattcacccgatcgtctcgaagattgagatccgcaaagaggggaaaaccgggcgggtgtactaccccgcgccatttatgaataacgacaatctggccctctaccaggatgcgtatgagatagggccggagaagatcattgacacttacgccgaggcgacgcgccacgtcgaccaggggctgtcgctgaccctgttcttccccgataccgccaccacccgcgatatcaacaaggcgcaaatttacgcctggaagaaaggcatcaagacgctctactacatccgtctgcgccagctggcgctggaaggcactgaaattgaaggctgcgtgtcctgcgcgctgtaaggagaacaggatgacccatttaacgcgcgtcagcgcaatcaactggaaccgcattgatgacgataaagatcttgaggtctggaaccgtctcaccagcaacttctggctgccggagaaagtgccgctgtcgaacgacattcccgcctggcaaaccctcagcgcggcggagcagcagttgaccattcgcgtctttaccggattgaccctgcttgacaccattcagaacaccgtcggcgccccggcgctaatggcggacgccttaaccccgcatgaggaggcggtgctgtcgaacatcagctttatggaggcggttcatgcccgctcttacagctccatcttttccacgctgtgccacagcaaggaagtggatgccgccttcgcctggagcgaaagctgcgatcccctgcagcgcaaggcgcagctgatgctggattactatcaggccgacgagccgctgaagaaaaaaatcgccagcgtgttcctcgaatcctttctcttctactccggcttctggctgccgatgtacttctccagccggggaaagctgaccaacactgcggatctgatccgcctgatcattcgcgatgaagcggtgcatggctattacatcggctacaagtaccagaaaggactggagatcgtcagccccggcaagcgcgaagaattgaaaaatttcgccctcgatctgctgatggatctttacgacaacgaactggcctacagccgggagctgtacggcgagagcggctggttcgacgacgtcagcgctttcctgtgctacaacgccaacaaagcgctgatgaacctcggctacgaggcgctgttcccggcggagatggcggcggtcaatccggcaatcctcgcagcgctgtcgcccaacgccgacgaaaaccatgactttttctccggttccggctcctcctacgtgataggaaaaatggaagagaccgccgacgacgattgggacttttaaccgtactttcaccaggaatatcgcaggcggattcctggtgattaatttcacaaaatagcgtttaatccaccaaatattctctccatgacctaaccgtcatcacttcgtcatatttagcagaaaaccggtccatttcagtagaattatccaaagataatcaaaaaatattaccaacaacaaattaccgcccagcccttatatcacgggggcttagccacagttgcccccatctgattttgccgagagtttgccattgagggttgtcacagaatctgagtatgttagggtgtaaaaagatcataatcaccatcgggtatcatatcgcaataaacaaataacaggaacttctctattgcatggcaattaaattagaaatcaaaaatctttataagatatttggcgagcatccacaccgtgctttcaaatatattgagaaaggactcaacaaagcgcaaatactggaaaaaacggggctgtcgcttggcgtcaaagacgccagtctggccattgaagaaggcgagatattcgtcatcatggggctctccggctcggggaaatccaccatggttcgccttctcaatcgcctgattgaacccacccgcggccaggtgctgattgacggggtcgatatcgccaaaatgtcggatgccgagctgcgcgaggtgcgtcgcaagaaaattgcgatggtttttcagtcctttgcgctgatgccgcacatgagcgtgctcgataacacggcgtttggcatggcgcttgccggcgttcccgccgccgaacgagagcaaaaagcccgggaggcgctgcgtcaggtggggctggagaattatgcccacgcctggccggatgaactctccggcggcatgcgccagcgcgtcggtttagctcgcgccctggcgattaatcccgatattctgttaatggatgaagccttctctgcgctcgatccgctcattcgtaccgaaatgcaggatgagctcatcaaattacaggcgaagcatcaacgcactatcgtctttatttcccatgaccttgatgaagccatgcgaattggcgatcgtatcgccattatgcaaaatggcgaagtggtccaggtcggcactccggatgaaatattaaataatccggccaatgattatgtgcgcaccttcttccgcggcgtggatattagccaggtattcagcgcgaaagatattgcccgccgcagcccggttggcctgattcgtaaaacgcctggttttggcccccgttcggcgctgaaattattacaggatgaagaccgggaatatggctatgtcatagagcgcggtaatcgctttgtcgggattgtctcgattgattctctgaaaacagccctcagcgccgggcaggggatcgaggcggcgctgattgacgccccgctggcggtggaagcgcaaaccccgctcagcgatctgctctcccacgtcggccacgctccgtgcgccgtgccggtagtggatgaagaacaacaatatattggcatcatttccaaacggatgttgctccaggctttagatcgcgagggggtgaatcatggctgatcagaccaatccatggggcagcgccccgtcaaccgacagcgcctcgcaggctgccgacgcctggggtggcgcctctactgccgcgccggctaatggcggcggcgccgactggctgcacagcgccccggcgccgcagccggaacagttcaatatcatggatccgttccataagaccctgatcccgctcgacagctgggtgacccacgccatcgactggatcgtgctgcacttccgtccgctgttccaggggatccgcgtgccgatcgactacatcctcagcgccttccagcagctgctgttggggatgccggcgccggtggcgattatcgtcttcgcgctaatcgcctggcagatctccagcctcggcatgggggtcgccactctggtatcgctgattgccatcggcgccatcggcgcgtggtcgcaagccatggtcactctggcgctggtcctcaccgccctgctgttctgcatggttatcggcttgccgctggggatctggctagcgcgcagcccgcgggcggcgaaaatcatccgcccgctgttggatgccatgcagaccacgccggcgttcgtctatctggtgccgatcgtgatgctgttcggcatcggcaacgtaccgggcgtggtggtgacgattatcttcgccctgccgccgatcgtccgtctgaccatcctcgggataaaccaggtgcctgcggatctgatcgaagcgtcgcgctcatttggcgccagcccgcgccagctgctgtttaaggtgcagctgccgctggccatgcccaccattatggccggggttaaccagaccctgatgctggccctgtcgatggtagtgatcgcctcgatgatcgccgtcggcggcctcggccagatggtgctgcgcggtatcggtcgcctggatatgggcctggcgaccgtcggcggggtggggatcgtgatcctggcgattattcttgaccgcctcacccaggccgtcggtcgcgacgcccgcagtcgcggcaaccgccgctggtacaccaccggcccgctggggcttatcactcgccctttctgtcgataagtcgataacagcgccgctccccgacaccagccgatgcccgggagcggcccttcccgttaaacaataagaggaaccaccatgcgacatagtacgatgttggccaccgccgcctttgccaccctgctcgccaccagcgccttcgccgccgacctgccgggtaaagggattacggtgaagcccgctcagagcactatctccgaagagagcttccagaccctgctggtcagtcgcgcgctggagaagctgggctacaccgtcgagaaacccagcgaagtggactataacgttgcctatacgtcgattgccgccggagataccacctttatcgccaccaactggcaaccgctgcacgatgacatgtacgccgcggctggcggtgataacaaattctatcgcaaaggagtgtacgtctcaggcgccgcccagggctatttgatcgacaaaaaaaccgctgagcagtaccacatcacctccatcgatcagctcaaagatccgcagatcgccaaactgtttgataccaacaatgacggtaaagcggatctcaccggctgtaccccaggatggggctgcgaagcagtgattaaccatcagattgacgcctatggcctgagcaaaaccgtcacccataaccagggcaactacgcggcgatgatggccgacaccattgcccggtataaagagggtaaaccggtgctctactacacctggacgccgtactgggttagcgacgtgctgaagcctggcaaggacgtcgtctggctgcaggtgccgttctcctccctgccgggcgagcagcaaaacatcgacaccaaactggccaacggcgccaactatggcttcccggtgaacaccatgcacatcgtcgctaacaaagcctgggcggagaaaaatccggccgccgccactctgtttagcgtcatgaagctgccgatcgccgacatcaacgccgagaatgcaatgatgcatgaaggccatgcttccgaagccgacattaacggccacgttgatggctggatcaaagcccaccagccgctgttcgacagctgggtgaaaaccgccctcgccgcgcagcagtaaacccgctcacggataaggcccagcgccttatccggcccccttgccccctttctcgtggccaggtcatagaaaagcgattccaggaatttccatagtgttaaggcgcatcgcgctctgttaaggtggagacatcggtcaaattgccaccttcacatggatccagcgataagttattcatatggaaaaccccgcgcccttaacctgtgccttacctgaacgcgtcgccaccgtcggcgaaggcatcaaagacagtctccccatcgtcatcagctaccttccggtggcattcgccttcggactcaatgccacccggctgggcttcaccccgctggaaagcctgttcttctcctgcattatttacgccggcgccagccagtttgtgatcaccgccatgttggccgccggcagttcgctgtgggtcgccgccctgacggtaatggcgatggatgtccgccatgtgctgtatggcccctcattgcgcagccgcattcgctcagcgctggataaaaagaaaaccgccctctgggccttcggcctgaccgatgaggttttcgccgccgctaccgccaggctggttcgcgataaccgccgctggagcgaaaactggatgcttggtctcgcttttacctcgtgggcatcgtgggtgtgcggcacgctggccggcgcctggtccggcaacggcctgctggtggattatccggcggtggaagccgccctcggctttatgctgccggcgctgtttatgagcttcctgctggcctctttccagcgtcagcagtcactctgcgtcacggcggcgctggcgggcgcgctgggcggcattctgttattttccattccggcggcgatcctcgccggaattgtctgcgggtgtctgacggcgctgcttcaggccatgctcaaggggatgccggatgaacagtgaagtccttctgctcggggtgatagtcggcggcgtcaactatctctttcgctatcttcctctgcgtttgcgcgccggccacgcccgtcctgcccgccgcggcccggtcagcgtgctgctggatactattggcatcgcctcgatttgcgcgctgctggtggtctccagcgtgccggagatcctcgccgatgcccatcgcctggcgccgacgctgaccggcttcctggtgctgggggccgccttctggaaaacccgcagcatcattgtcccgaccctgctgtcggcgtttgcctatggtctggcatggaaaatcaccaacgggctctaagctttacgtatcaattttggtcaataattcatttgatttatttgtcacaatagttattatatcggctgtaattaatgaggtcatacccaaatggatagttcgtttactcccattgagcaaatgctcaagttccgcgccagccgccatgaagatttcccgtttcaggagatcctgttaactcgtctttgcatgcatatgcaaggtaagctgctggaaaatcgcaataaaatgctcaaagcgcagggaattaacgagacattatttatggcgctgattacgctggagtcacaggaaaaccacagcatccagccgtccgagctgagctgtgcgctgggctcgtcacgtaccaacgccacccgtatcgctgatgaactggaaaaacgcggctggattgagcgccgcgagagcgataacgatcgtcgctgtttgcatctgcaactgaccgaaaagggccatcagtttttgcgtgaagtcctgccgccgcagcataactgcctgcatcagctgtggtcttcacttagcaccagcgaaaaagatcagctcgaacacatcacccgcaaactcctgagccgccttgatcagatggaagaagaaggcgtgctagcggactctctacgctaagggcggcgtcgctcagcccatttttacgttgcaaggaaaacagccaggccagcagatctctgctggcctttctgataaacaggtcggctcagccgatgtgaaataataagatcgtggagaataacatgagtgcaaatgcggagagccaaaccccgcagcaaccaggcagcaaaaaaggaaagcgtaaaggcgcccttctgttgctgacattgctcttcattattattgccgtggcatatgggatttactggtttctggtactgcgtcactacgaagagaccgacgatgcctacgtagcagggaatcaggtacaaattatggctcaggtcgcgggcagcgtgaccaaagtctgggctgacaacacggactacgtgcagaaaggcgatccgctggtcactctcgatcggaccgatgcccaacaggcgtttgaaaaggctaagacccaactggccgccagcgtccgtcagacccgccagcagatgatcaacagcaagcagctgcaggcaaatatcgacgtcaaaaaaaccgccctcgcccaggcgcaggctgacctgaaccgccgcatcccgctgggcgccgcgaacctcattggccgcgaagagctgcagcacgcccgcgataccgtcgccagcgcacaggccgaactcgacgtggcaatccagcagtacaacgccaaccaggcgatcgtgctgggcaccaggctggaacagcagccggcggtgctccaggcggccactgaagtgcgtaacgcctggctggccctgcagcgtacgcagatcgtcagcccgattagcggctacgtttcccgtcgctcggtacagcctggcgcgcagattggcaccaccacgccgctgatggcggtggtcccggcgaccaacctgtggatcgatgctaactttaaagagactcagctggcgcatatgcgtatcggccagccggccaccgtgatcagcgatatctatggcgatgacgtgaaatacaccggtaaagtggtcggtctggatatgggcaccggcagcgccttctctctgctgccggcgcagaatgccaccggcaactggatcaaagtggtacagcgtctgccggttcgtatcgagctggatgaaaaacaactagcggaacacccgctgcgtatcggtctctcgacgctggtggaagtcaacaccaccgatcgcgatggtgaaatgctggccagccaggtgcggagctccccggtttacgagagcaatgcccgcgaaatcgctctcgatccggttaataagctgatagacgagatcattcaggccaacgccggataattcggggtgagtgtaatgcaacagcaaaaaccgctggaaggcgcgcaactggtcattatgaccattgcgctgtcgctcgcgacgttcatgcaggtgctggattccactatcgccaacgtggcgatcccgaccattgccggcaaccttggctcgtcgctgagccaggggacctgggtcatcacctcgttcggggtcgctaacgccatctccatcccgatcaccggctggctggccaagcgcgtcggcgaggtgaagctgttcctgtggtcaaccaccgccttcgccattgcctcctgggcctgcggcgtctccaacagcctgacgatgctgattttcttccgcgtcattcaggggatcgtcgccgggccgctgatcccgctgtcgcaaagtctgctgctcagcaactatcccccggcgaagcgctctatcgctctggcgctgtggtcaatgacggtgattgtcgcgcccatctgcggtccgatcctcggcggctatatcagcgataattatcactggggctggatcttctttatcaacgtgcccattggcgtggcggtggtgctgatgaccctgcagaccctgcgcaaccgggaaaccaaaaccgaacagcggcggatcgacggcgtcggtctggcgctgctgatcatcggtatcggtagcctgcaggtgatgctggaccggggtaaagagctggactggttctcctccaatgagattatcattctgaccatcgtggcggtggtggcgataagcttcctgatcgtctgggagctaaccgacgataacccgattgtcgatctgtcgctatttaagtcgcgcaacttcaccatcggctgcctctgtatcagtctggcctatatgctctacttcggcgccatcgtactgctgccgcagctgttgcaggaggtctacggctacaccgcgacctgggccggcctggcgtcggcgccggtgggggtgatcccggtcattctgtcgccgattatcggccgcttcgcgcataagctcgacatgcggcggctggtcaccttcagctttattatgtacgcggtctgcttctactggcgcgcctggaccttcgaaccggggatggactttggcgcctcggcgtggccacagtttatccagggcttcgcggtggcctgcttcttcatgccgttgaccaccatcaccctctccggcctgccgccggagcggctggcggcggcgtcgagcctgtcgaacttcacccgtacccttgccggctccatcgggacctcgatcaccaccaccctgtggaccaaccgcgaggcgctgcatcatgcgcagctcaccgaatcggtgaccccctttaaccccaacgcgcagcagatatacgatcagctgcagggcatgggaatgacgcagcagcaggcgtccggctggatagcgcagcagataaccaaccaggggctgattatctccgccaacgaaatcttctggatttctgcggctattttcatcctgctgttggggctggtgtggttcgccagaccaccgttcagcgccggcggaggcggcggcggcgcgcactaagcctcacataaagggacctccgggtcccttttttacggcgtcaggttgtccagttctcgctagtttctgtctcgtttgcgaaagcccgtcaccctgcgctcgggcaggataaaggctgaccattaaggagaacactatgctgagccatcctgctgaaaagtaccgtccctatccgccgatcgccctgcctgaccgccgctggccagaccggcaaatcagtcacgccccgcgctggctgtcgactgacctgcgcgacggcaaccaggcgctggcggagcccatggacagcgcccgcaaactgcagttctgggatctgctgctggagtgcggctttaaagagattgaagtcgccttcccttccgcctcacaaaccgatttcaactttgtccgccagctgattgacgaacagcgcatcccggaggatgtcaccatccaggtgctgacccaggcgcgagacccgctgatcctgcgcacctttgaggcgctgcgcggcgcccgccgggctaccgtccacctctacaatgccaccgcgccgctgttccgcgagctggttttcggcatggacaaggccgaggtgatcgccctcgcgacccgcgccacccggcttatccgtcagcagtgcgaacagcagccggagacccgctggcaatatgaatattcgcctgaaaccttctgcttcaccgagcccgagtttgcgcttgagatttgcgaagcggtggcggatgtctggcagccctgcgccgagcgaccgatgatcgtcaatctgccggcgacggtggaagtcaacacccccaacgtctatgccgatcagatcgagtatttttgccgccacttctcccgccgcggcgaggtctgcatcagcgtgcatccgcataacgatcgcggcaccggcgtcgccagcgccgagctggcggtgatggccggcgccgatcgggtagaaggctgcctgtttggcaacggcgaacgcaccggcaacgtttgtctggtgactttggcgatgaacctctacagccagggcatcgaccctgagcttcgcttcgagcagatgaaccgggtggtggaggtggtggaaaactgcaaccagatccccgttcacccgcgccacccgtgggcgggaagtctggcttacaccgccttctccggctcccatcaggatgcgatcaaaaaagggtttgatgcccgtcagcctggcgatccgtggcagatgccctacctgcccattgacccgcaggatattggctgcagctatgaggcggtgatccgcgtcaacagccagtcggggaagagcggcagcgcctggcttatcgaacaaaatcatggtctgaaactgccccgcgggctgcagcaggacttcagccagcacgttcagcaggccaccgatagcgacggcaaagagatgacccaccatgcgctgtggcagctgttccgcacgcgctacgggctgcaggcgcagccggcgctgacgctgctcgattatcagagcgccagccagcaggatggccagctttccctgcaggcaacgctgcgtcaccacggcgaaacccgacgcctgcagggccagggcaacggcctgctctccgccgcagccagcgggctcagcgcgctgtttcggcagccgtttatgatcaaggactatcatgagcatacgctcggcgcgcgcagcgacagccggtcggtggcctatatccgctgcgtttttccgcaaggagaaagctactggggcgtgggtatcgataatgacgtggcgcgcgcctcgctgcaggcgctgtgcaatgcgctcagcgccgccgatcaggccgggggacgaaaatagtcgctgggggcgacgcccatcacccgacgaaacatggcgctgaaggcgctgtggctaccgtagcccagctccagcgccacccgcagcacggagtggccctgcgccaggcgcaccagcgcttccattagcttcgcccggcgcacccactcgctccacgtcaggctagtctgctgctgaaaatggcggtttagggttcgctcgctcatgctgcacgccttcgccgcctggccgctgctccaggcctcgcccggcgcctcgcgtacctgctggcacagccgacgcagcgtttcgctttgcggctccggcaggccaaacggcaggatcgccatcccgcggatctcatcgaggatcagttcataaattctttcgtcgcggctggcgggggcatagcgttccgccagcgccagggatgacacgatcagttcccgcagcagcggcgtgatctgtacaatctggcagcccgccggaagatcggcgcgcgccagcggatcgataaacagggtgcgcgccgccacgttgccggtcatgcgcagcgcgtgcggcgttcccgccggcagccagacgccgcgcccgggcggcaccacccagtagcctaccggcgtcgcgacccgcaccacgccgcttagtatatgcagcagctgggcgcagtcatgttgatgccagtcttcctggtcaccgtgggcataatcatgggcaaagggcaccagtgggcggtgctgaaaggagaaggaaagcgtcgtcgtcatcgcggcgtcagaagagcggcccggcgacaggcgtcgggccgtggcggaagcactagatgtgcagttcctgcagtttttctttcggcaacgccagttcgtcgttgctgttgatgcgcacatcgcgctcaatgatatgacgagcgatgtcctgggcctcttccagcgagtgcatggtgtaagtcccgcactggtagacgttgagctccgggatctggttctgatctttcaccttcagcacatcggccatcgccgctttccaggcgtcagcgacgcgctgctcgtccggcgtaccaatcaggctcatatagaagccggtgcggcagcccattggcgaaatgtcgataatttccacgccattcccgttcagatgatcgcgcataaagcccgcgaacagatgctccagggtgtggataccgcgttccggcatcacttcctggttcggtacgcagaagcgcagatcgaaaacggtgatttcatcgccatgcggcgtgttcattttcttcgcgacacgcaccgctggggcttccattcgggtatggtcgactgtgaaactatctaacaacggcattcgtcacctccgggagtgaatttttttaaaataaaatgaactctttgttcagccgcgagtctcagtatatgaaagacgcgcatttattatcatcatcatccctgaatcagagatgaaagtttggccacagtgatgtggcctttttcttttccagcgctacgcgtgccgcgccagcagcgcctcaaacggctcgctgtcttcagcttccactttcttctgtcgcgccaccgacgcgtcgcgctcggcgataaaatcgtcttcgctcaggatctccagcggctcttcgcgcagctgcgtccggtaacgatcggcaagcgcacggccggtaccgccaatgccttcttcaatcatagaacgcagaatgcgggctgagaaggttaattccggatcgtcaaagcaggccagcagctcgtcgcagacctgctgatatgcctggccaccgtggatactgtccagggtctgcgccacgcggcgtaaatcgcggaacagatctttgcccacctgagccagcgggaactgcgcgctttcgcagccaatccccagcgttaagcccggcttacgcccttccagaatcacccgattccagttggtgcgggtgcacagcagctcatcgctgctcatctccggcgcgtcggccagcgcgcaccagaccataaacaggtcgaggaaacgcacctgctgggcgtcaacgccgatcggcgagaacggattgatatccagcgaacgcacttcgatatactcaataccaccgcgcaacagcgcatcggacggggtttcgccccgacgggtgacgcgtttcgggcggatcggcgcataaagttcattttcaatctgcagaatgttgctgttgatctgcaggtacttgccgtctttctgcagcccgattttggcgtactcttccgacggcgttttaatcgcccgcttcaatcctgccacatactcgtgcagatcgttaaacgtaattccgagattgctttgcgacttattggtataaccaaggtcgctgaggcgcagcgaggtggcatacggcaggtaatacatgccgttgcccgtttcctcaaagggcagcgttgtcggtttgccttgcaggaatgaggagcaaatcgccggcgaggcgccaaacagataggggatcacccagccaaagcgatagtagttacgaattgagcggaaatagcccgccgaaatggcctctttaccactctcggcatcttccacaccacattttgcctgccagaaggccatcggtagggagaagttatagtgcacgccggagatagtctgcatcagcgcgccatagcggttcttcagcccctcgcgatatagcgttttcaggcgccccacgttagaggtgccgtactgcgccagctcaatatcctgaccgggggcgatatagcatggcatgctcagcggccacatccgctcgtcgccaagctgacgcgcggtatagcgatggacatcgcgcataaaggtcagcatatgctcaatatcgccatctactggcgtaatgaactcaagtaaagcttcggcaaaatcggtggtaatccatttatgcgtcagcgctgagcctaacgccggagggtgaccggtcgttgcaagggtgccgtctgcgttcacgcgcagcgtttcccgctccagaccacgttgaataccctgcagagcctgcggatgtttttccagccaggccagcgcctgtgatacgtccgggatcaatttgacctcccgcctgtcgaaatcgtttgaataagcataattgtaatggatgaactgtcagtccaattagtgccaccacgtcatgccctgaagcgtcgctgccgcaatagcgatatagcgcagcgccttaccaaggcataagaaaaagagtaccggtccccaggaaatgcgcatccatcccgccagcaaacacagtaaatcgccgacaaccggcgcccagctcagtaagagcgtgaccgcgccgtagcgcttaagccagccggccgcccgctcctgccagcgcgaggttttgcgcagcggaaacaagcgccccagaataacgttagttacccctccaaggctattgccgattgttgctattaatactaaccaccacggatgactgacccccgcaagtagcatagccaccagcacaacctccgaattgccggggagcagcgtggcgcttaaaaagctactggcaaacagcgaggtgagtgacagcgcgtcgctcacagcaaacgcacgtcaactgcgtccattcccgcgcgcttcgccgcctgcagaccaaagtcggcatcttcgaagacgacgcatttttccggcgcgacgcccatgcgctcggcgcacagcaggaaggtatcgggcgcgggtttatggttgaccacatgatcggccgccaccaccgcggagaagtaatgacgcagccccaggtgcgccagcagcgcttcggcgacggcgctctcgctgccggttcccaccgacatcgggcgacggccgtgccatgccttaaccacctcaatcagcggcaacgggcgtacgctgtccagcagcatcgctttgacggcctgggttttttcctgcgccaggcgatgtggatcgagatcggcctggttgagttcgataatcgcctgggcgattcgccaggttggtgagccattgagcgcgaccatcgcctgttcgtcgaaacgcataccgtagcggcccaatacctcgttccatgcctgccgatgggtcggctcggtatcgagaatggtgccatccatatcaaagatcagtcctgcgtaaccttcgtacattgtcttctcaccaaccggtttgggaatgattactgtaacgcaaaagcccgccgttgtcgcggccagcggcgcagacgacaaaggcgccctcaggcgcccccaaacattaggccggataaccagccttatttaatacgcagatcgttctcgaccattcgcacgccctgcactcggcgtgtgacttctatggctcgtttagcgctctccgcggaggagacaaatccgctcagctggacgcggcctttaaaggtctggacgctaatttctgaggacttaatgtctttatcgttaaagagcgccgttttcaccttggtggtcaccacggtatcgtcaatatagccgcccgtactctcctttgtagccgatcccgcacagccagcgagggccgtcgttaccagcagcgtcgcgcaaaaagcaggtattgctttgaaccatttcatggatttctctccttgcatttatctcagcctgataacgctgatatacaaggataaattatagtggaaagcgcgtcttgccaataaaaaagtaggatgaagccagtgatggaaaacgaggtaatcgggatggtgagagaagagtgaagattatgcattcagaacgggtgctgcgataatttcgcagcctacgcaacaacatcgtcgttgttactgaggagaatatggtgcatccgggaggatgactcggctacgcctcgcccttcgggccgttgcttacgcaacattatcccccctggtgctggcgatgatttcgcagaccataaaacaacatcgtcgctgttactaaggagaatatggtgcatccgggaggattcgaacctccgaccgctcggttcgtagccgagtactctatccagctgagctacggatgcatcgggaaagctattttactgcggggttactctcctggcacttacgatggtttcgcaaaccagataacaacaatgttgctgttactaaggagaatatggtgcatccgggaggattactcggctgcgcctcgccctacgggccgttgctcacgcaacgttatcctccctggtgctggcgataatttcgcagaccataaaacaacatcgtcgctgttatcaaggagaatatggtgcatccgggaggattcgaacctccgaccgctcggttcgtagccgagtactctatccagctgagctacggatgcatcgggattactgctgtaattctgatatcaaatttcgcgatttgccattcttattaaagaatggtgcatccgggaggattcgaacctccgaccgctcggttcgtagccgagtactctatccagctgagctacggatgcatcgggaaacttgctttactacgcgtcagtgtcacaactaacacatgccacactgagtatgatggcctaatcggtagagtgactcgattatgcctcgcactgcgggccgctgctttcacagcgctcttctcgcttaattcagaaagaagatggtgcatccgggaggattcgaacctccgaccgctcggttcgtagccgagtactctatccagctgagctacggatgcaaaatggcggtgaggcggggattcgaaccccggatgcagcttttgaccgcatactcccttagcaggggagcgccttcagcctctcggccacctcaccacacacgcctctttcgagtgcttcgaagaacttgtttctgctcttcgtcgctgcgatggcgcacatattactttctggtacttataagtcaaacactttttcgagaccttttttcgtttgcacacttcgcacgcaattcgcgtgcaaaaacggcaaaaagggcaatttatcaacaggaaatcagccctgacgctggcataacgccaaacgaccaaagcggcaaagggtaatgaaaagcggtatggcgcagggggaaaaaaagaaaaagggaaaaagcgacggtaagtgatgcgcctcactgcacagcgaggcgcggaaaccttagtaactggactgctgggatttttcagcctgaatacgctggtagatctcttcacggtgaacagacacttctttaggggcgtttacgccaatacgaacctggttacccttcacccctaaaactgtcacagtgacctcatctccaatcatgagggtctcaccaactcgacgagtcagaatcagcattctttgctccttgaaagattaaaagagtcgggtctctcgtatcccggcattatccatcatataacgccaaaaagtaagcgatgacaaataccttagggtataagcagtcatggcatcacattctgttaaacctaagtttagccgatatacacaatttcaacccgactttatcgttatcagtgtttctgacgcaaggtgccgtaaccctctggttatggcacctatacccctcatacttcaagttgcatgcgtgttggctttcctcgctcaccccagtcacttacttgagtaagctcctggggattcgctgcgtcgccgccttcctgcaactcgaattatttagggtaaatgcgtttatagttattacagttttgcgctgacccagcctttcacactggctaacgctgcagggagagcagacgcatcggtaccaccggcctgcgccatatccggacgaccgccccctttaccgcccacctgctgagcgaccataccaaccagctcccctgctttcacgcggtctgtcacatccttagacacacctgcaatcagagaaaccttaccatccgctaccgtagctaatacaacgatcgtcgaaccgagctggttcttcagatcgtcaaccatggtacgcagcattttcggctcaacgccggtcagttcgctgaccagcagcttaacgccgttaatctcttccgctttgctggagaggtttgcgctctcctgcgccgcagcctgctctttcagctgctgcagctctttttccagctgacgggtacgctccagcgcggcgcgaaccttctcgccgagattgtggctgtcacccttcagcagctgagcgatatcattgagctgatcgctctgcgcatgcaggatggccatcgcgccttcgccagtcaccgcttcgatacggcgcacgccagcagcggtgccggactctgacgtgatgcggaacaggccgatatcgccggtacgcgccgcgtgagtcccgccgcacagctccgtggagaagtcgcccatccgcagaacgcgcacgcgatcgtcgtatttctcgccaaacagcgccatggcgccggatgcgcgcgcggcatcgatatccataatgttggtttcgatagccaggttacgacggatctgcgcgttgaccaggtcttccaccgcacgaatttcttccggcttcatcgcttcaaaatgcgagaagtcaaagcgcagcgctttatcattgaccagcgaacctttctgcgccacatgggtgccgagcacctggcgcagcgccgcgtgcatcaggtgcgtcgcggagtggttgagacggatacgatgacggcgagcctcatctacgtcggcctgcaccgcgtcacccactttcagtgagccgctggcgactttaccgatatgaccaatagcctggccgtacttctgcgtgtcgctgactgcgaaggagaagcccgcgccttttaattcgcctttatcgcccacctggccgccggactccgcatagaacggggtctggtcaaggatcaccaccgcttcctggccagcgctaacgctatccaccgctttgccgtcgataaacagggcggtaaccttgccgttcagctccagatgatcgtagcctttaaattcagaggcgccgtcaacgcggatcatcgcattatagtcggcgccgaaaccgctggactcgcgcgcgcggcggcgctgctcttccatcgcggcttcaaaaccagcttcatcaaccttgatgttgcgttcgcggcacacatcggcggtcaggtcgaccgggaagccgtaggtgtcgtacagacggaaggcggtttcgccgtccagggtgtcgcctttcagcttcgacagctcctcatccagcagcgccaggccgcgctcgagggtgcgggcaaactgctcttcttcggttttcagcacctgctcaacctgagcctgctgctgcttcagctcgtcgccggcggagcccatcacatcgatcagcggggcaaccagtttccagaagaaggtgtccttcgcgcccagcatgttgccgtgacggatcgcgcggcgaatgatacgacgcagcacgtagccgcggttttcattcgacgggatcacgccgtcggcaaccaggaaggcgcaggagcgaatgtggtcggcgataacgcgcagcgacttgttcgtcagatcggtcgcgccggtgactttcgccacgctggcgatcagatcgcggaacaggtcgatgtcatagttggagttaacgtgctgcagcaccgcggcaatacgctccagacccataccggtgtcgacggacggcttcggcagcggctccatggtaccgtcagcctgacggttgaactgcatgaagacgatgttccaaatctcaatgtaacggtcgccatcttcttccgggcttcccggagggccgccccagatgtgatcgccgtggtcaaagaagatttcggtgcacgggccgcacggaccggtgtcgcccatctgccagaagttgtcagaagcaaacggcgcgcctttgttgtcgccgatgcggataatacgctcgcgcggaacgcctacttcattggcccagatgtcgaaagcttcgtcatcggtctcgtaaacggtaacccacagtttttctttcggcagcgcgaaccagttctcaccggtcagcagttcccacgcgtatttgatggcatcctgcttgaagtaatcgccaaagctgaagttgcccagcatttcaaaaaaggtgtggtgacgcgcggtgtaaccgacgttttccagatcgttgtgtttaccccccgcacgcacgcaacgctgtgcggtggtcgcacgcgaataattacgtttgtcgagaccaaggaagacatccttgaactggttcatccctgcattggtaaacagcagggtcggatcgttgtgcggcaccagggagctgctggcaactacctgatgtcccttgctatggaaaaagtcgagaaacgcctgacggatctcagcggtgctcttgctcataattatcctgaaatcaagctacacgtcatccttcaagtcgcctctgtcctggctgcgcttgctcttccggcaccgaactgacgtgcgttgcgaaagagagtctctcttgccgccctgatgcagcttgaatgattttgtgtaaaggaataatcgcccaggccgctgcctgcacagtcacaaccagcggcccgacggaataaagtgggaataagataagttttctttacggcgaagtaaaatcccggatgggtcaatctgcaaaatttcgccagatttcctggatatcttccatcaggtagccgcggtaaagcaggaatcgctgaactttcactttttcagtaaaggcggaaggtaacggttcgccgtatttacgctgtgcctgctccctggcaaggctcacccagtcgatatcgcattcgcgcatcgcctggtcaacgacctggcgcgcaatgcctttctggctgagctcctggcgaatgcgcgccggaccatagcctttgcggctccggctggcgatgaactggccgacgaagcggttgtcgtcaaggtagcggttttcgatacaccaggcgacaacctgctccagctcgtcgggggtgacgtccagcgcctcaggaccgtttttgctcatcaccggagcgaccagcttgcgtcgcagctcctgctcgctgtggtcgcgcatcgccagaatgcggatagcacggtccagcaggcgggcgtagccggagcggcgtgatgaaggttcagtcacaggcacctcgataatctcacaaagcaaaagggctgcctaagcagccctgtcagtcttgcagacgatatcagaagtcctgttcggtttcttctgcgtcgttgccgtcaacaacgaagtctggcttcgcatcctgattgttgagcagcagttcgcgcactttcttctcaatctctttcgccgccgccgggttctctttcagccaggtgatcgcgttcgctttaccctgaccgattttgtcgccgttgtagctataccaggcacccgctttctcaatcagcttctcttttacgccgaggtctaccagctcgccgtagaagttgatgccttcgccgtagaggatctggaattcggcctgtttaaacggcgcggcaatcttgtttttcaccactttgacgcgggtttcgctgccgacgacgttgtcgccctctttcaccgcgccgatgcggcgaatgtccagacgcacagaggcgtagaacttcagcgcgttaccaccggtagtggtttccgggttaccgaacatcacgccaattttcatacggatctggttgataaagatcagcagcgtgttggactgcttcaggttacccgccagcttacgcatcgcctggctcatcatacgcgccgcaaggcccatgtgagagtcgccgatttcgccttcgatttccgctttcggcgtcaacgccgcgacggagtcgacgacgataacatcaaccgcaccagagcgcgccagcgcgtcacagatctccagcgcctgctcgccggtgtccggctgagaacacagcaggttgtcgatatcgacgcccagtttgcgtgcatagacaggatccagcgcatgttcagcatcgatgaacgcacaggttttaccttcacgctgcgctgcggcgataacctgcagcgtcagggtggttttaccggaggattccggaccgtagatctcgacgatacggcccattggcagaccgccggcgcccagcgcgatatccagagaaagcgagccggtggagatggtttccacatccatggtgcggtcttcacccaggcgcatgatggagcctttaccgaattgcttttcgatctggcccagtgcagccgccaacgctttctgtttgttttcgtcgatcgccattgttactcctaatcatgcagggtaaagcgtgttcgcttcgccgttaatatttgttcagttgaggcaattatactgtatggtcatacagtatcaagtgttttgtagaaattgttgccagagcagatttagcgcataggccgtcgcctgacgacgcaccgcttcgcggtctccggcaaagcattcccgccgcgtcaccccttgcccgctcacgctggcgacgccgaaccataccgtgccgaccggcttttcgacgctgccgccatccggcccggcgacgccgctaacggagatggcataatccgcacgcgccgcgcgcagcgcgccaatcgccatctccaccaccaccggttcgcttaccgcgccgttgtcgcgcagcgtcgcttcgctgacgccgatcatttgcgatttagcttcgttgctgtaggtgacaaagccgcgttcaaaccacgccgagctgccggcaatatcggtgatcgctttcgcaatccagccgccggtacaggattccgccgtggtcaccgtcgccccacgcgccttcagcgcccggccaatcttctcgcttagctgcattaattctgaatcggtcattatcgccccgctttgctctggataaagaggccatcaaagatagcactttcgacagagatatggggatgaagcggcgattttacgaggggggatccagaaatgggtcgtcctgtgataaccaggacgaccagacaacctgttacttcatgctgttagcgataagctcaacgttgtgacgcatcattttgacgtaactatcggcgacgccgcccggcttagatagcgcttccggatagagttcgccccccggctgcgcgccggtggcgctggcaatctgcttcaccagccgcgggtcaagctggttctccataaaccaggtatggacgccatccgctttgatttgcttaatcagcgccgccacctgcgccgcgctagcctcgctctctgaagagagcccctgtggcgcgaggaaggtcacgtgataagcccggccaaaatagccgaaagcgtcatggctggtcaggaccttgcgcttggccagcggaatggcgctgaactgcgctttcgcccagccgtcgagagacgtcagctggtcgatatagcgcttgccgctgctggtcaacgccgctttatcttccgggtcggctttcaccagaccatcgaggatattctgcgcatacaatgcgccgttcgctgcgctgttccaggcgtggggatcggtcaccgttttaccctcttcatcaagggtatgggtcttgacgcctttcgatgccaccaccagctcgcccttaaaaccagaggccttaatcaggcgatccagccacccttccagccccaggccgttaaccaccaccacgtcggccttgctgagcagcgcgctatccttcggagacggttcgaaggtgtgcggatcgccgtccgggccgaccagggtatccacatggacatgctccccgccgacctgctgcgctatatcacccaacaccgaaaaactgcttaccacattcagcgttttcgccatggccccctgcgccatcaggccgagggccagcgcgaccactattgcactacgtttcatcatttccttaccccatcaatgtgcgccaaccgaccagcagccggctgcgcgtgccaaaaaatagcgaaacaaaaaacagtgcgctggcggtcagcacaatagcgggcccggcgggaagactaatcgcccaggagaggcttaatcccagccaggcgcagagcgcgcccattcccgccgccagtagcagaatgcccggcagcgtgcgcgcccagcagcgcgcggcgaccgccgggagcatcattacccctaccgccatcagcgtgccgagcacctgaaacccggccaccagattaagcaccagcagcgccagaaaaagcccatgcagcagcgcaggcagccgccggtgattcacctgcagccaggcgctgtcgaacgcctcgctgaccagaccgcggtagcacagcgcaatgcacaatagcgtcaggctggcgacgccgctgacaaacagcgccgcatcgcggtcgaccgccagaatggagccaaacagcagatgcaggaggtccacgctggagccgcgcagcgacaccagggtgacgcccagggccagcgagcccagataaaatccggcaaaactggcgtcctcttttaacggtgtccgccggctcacccacccggccaccagggcaaccacgatgccggcgatgaagccgccgagggtcatggccagcagcgacatgccgctcagcagataccccaccgccacgccggggagaatggcgtgcgacagcgcatcgcccatcaggctcatgcgccgcagcagcaggaagacgcccagcatggtggtgctcagcgacagcgccagacacaccacgagggcccgacgcataaagccgaattcaatgaaaggctgaaagaaggtgtgccagatcatgccgacctcacatgactgaaggccgggagcaccgcccgggtagcgccccagcaggcgcgctggggagtcagcagcagcgtctcggggaaaaagtcggccacccgctggttatcatgcagcaccgccaggatggtctgtccctgccggtgcatctcgaggatcaaatccattagttcgcgactggtcgcttcgtcgataccggtgaagggctcgtcgagcatcaccagcggcgcctgctgcaccatcacccgggcaaatagcatgcgctgaaactggccgccggagagcgcttcgatcggcgttttcgccaggcccgccagcccgacccgctccagcaccgcgccgatgcgtcgccgggtgccgccccccagaccacgcagcagcgacacgccgggccatgcgccctggcttaccacatcctgcacgttgagaggaaactgcgactcgagggcatggcgctgcgccagccagccgatcaccggccgttttccctgccagcgcaggcggccactgaccggcggaagaaacccggcgagggttttcagcagcgttgattttccgcagccattgaggccaacaattgccgtcaggctgccggggcatatcatcccgctcagcggaggggtgatcgctaccccgtcatagccggcgaccagctgctccagttcaatcatggcagcgtcaccgcccaccaggttgctaaccatagcgccgccagcagcacgcctgcgatagccgcgcgcgccgcgccggatgccataaaaatcgatgtgaacatatccccgcctcaatttaatgttataacataacaataacgaagcaaagaaagaatgtaaatcagcgtcagtcagcggaaatgtaacaaaggtcaacaagaggcatggagacggaaaaaacggggggataagcgcggcctccccggcgtcatcccccggtcgcgctgcgcttcccggggctagcaaccggataccagaccgtaacccggataaggcgctacgcgccgttatccggggaggctggggaaattgtcagccggatgaaaggattaataaccgccgcgggcctgcgcaaccgccagacccagctgccagacggccatcgcgtagtgggtgctgtggttgtagcgggtgatggtgtagaagttcggcagcccgtaccagtactcatagccggtgccgacgtccagccgcagcaggctggcctgctgatggttacccagcggctgggtcggggtcagccctgcggccgccagctgcgaaacgctgtatttagtcttgaaaccattctccagccccggggcctgccccagcgcctgcaccgccaccagatcgccgctcacccagccatgctgtttgaagtagttggccacgctgccgatagcatccaccgggtcccacaggttgatatgtccgtcaccgttaaaatcgaccgcatactgcttataggaggacggcataaactgaccgtagcccatcgccccggcgaaagagcctttcagatccagcgggtcgtcgctttcgctgcgcgccattagcaggaaagtttccagctccgacgagaagtattcggcgcggcgcgggtagctaaacgacagcgtcgccagcgcgtcgaggatccgggttttgcccatcacccggccccagcgagtctccacgccgataatgccgacgatgatttccggcggcacgccgtaaacctgataagcgcggttgagcgcgtcctgatactgattccagaacaccacgccgttctgcacattatccggggtaatgaactgtttcttgtagcgcagccaggcgccggtcggcccggttggcggcaggccggtcggcgcctgacgatccatcagccgcaggacgtaatccaggcgctttgcctgcgacaggatctcctgcagctgctgcctgtcgaagccgtgcttcgccaccatcttatcgataaactgcgccgccgccgggttgttggcgaagtcgccgcccatctgcatcacgttatgctgcggttccagcaaaaagccgccggttccactcgccatctccgtttccgcgggggtcttgggtttgctgctgcaggcagcgaggagcacacaaaggggaagtaaagccagatagcgacgcttcaacatgggaattccgtttaacaaattcagcaagggataattatggtaaagcatgcgacgaccaacaagaaagcgacaatctgtttgtagacaaaatagtccttcaacggctcctcccctgcgtgctttcatgccctgcaatatttcatctcgcccgcatcatctttcaaaataaaatatttatctttcattttgcgatccatttaacacttttaaacctttcaaaatgattaaaatcagcctgcgattagcaagaaaaataacatgctgaaggagagaacaatgattgacgtcgtgacccacggcgcggagtggtttatcggcctgtttcagaaaggcggcgaggtatttaccggcatggtgaccgggatcctccccttgctgatcagcctgctggtgatcatgaacgcgctgatcaactttatcggccagcagcggatcgagaagctggcgcagcgctgcgccggaaacccaatctcccgttacctgctgctaccctgcatcggcaccttcgtgttttgtaacccaatgacgttaagcctcggtcggtttatgccagagaagtacaagcccagctattacgcggcggcgtcgtatagctgccactcaatgaacgggctgtttccacatatcaaccccggcgagctgttcgtctatctcggcatcgccaacggcctcactaccctcggcctgccgctcggtccgctggcggtgagctacctgctggtcgggctggtgactaacttcttccgcggctgggtcaccgacctgaccacctcgattttcgagagaaaaatggcgattcagctttcccagaaagtgcatctgtcaggagcgacatcatgacccgtattcgtatagagaaaggcaccggcggctggggcggcccgcttgagctcgacgccgtcaaaggcaaaaagatcgtctatatcaccgccggcacccgcccggcgatcgttgaccgcatcgccagcctgaccggctggcagccggtggacgggtttaaagagggggaaccagcggaaagcgacatcggcgtggcgattatcgactgcgggggcaccctgcgctgcgggctctatcctaagcgccgcatcccgacggtgaatatccatgccaccggcaaatcagggccgctggcccagtacatcacggaagatatttatgtctccggcgtcaaagaggacaacatccagtgcatcgctcccgacagcgcaggggtttccgagccgccggcggaaaacaagagcgcgggtcgcgattacgacaccagcaagaagattactgaacagagcgatggcctgctggcgaaggtcgggatgggcatgggttcggtggtggcggtgctgttccaggccgggcgcgacaccattgatacggtgctgaaaaccattctgccgtttatggctttcgtctcggcgctgatcggcatcatcatggcctccggcatcggcgactggatcgcccacggcctggcgccgctcgccagccatccgctggggctggtaaccctggcgctgatttgctctttcccgctgctgtcgccgtttctcggccccggcgcggttattgcccaggtgatcggcgtgctgatcggcgttcaaatcggcctcggcaacattccgccgcacctcgccctgcccgccctattcgccattaacgcccaggccgcctgcgattttattccggtaggcctgtcgctagccgaagcccgtcaggataccgtgcgcgtcggcgtgccgtcggtgctggtcagccgctttctgaccggcgcaccaacggtgctgatcgcgtggttcgtttccggatttatttaccagtaagaggttcctgcagatgactgtgatttaccagaccaccattacgcacatcggcgcctgcgcgacgatggcgctggaagagcaaatgctgatcaccttccgcgagggcgccccggcggatatcgaagagtactgctttattcacaaccacggcgagcttgctggcacgctgcagccgggggcagagctgcagcttggcgaacagcgctacccggtgaccgccgtcggcgaggtcgctgaacaaaacctgcgcgagctgggccacatcaccctgcgctttgacggccatcgtgaagcggagttcccaggtaccgtccatgtggcgggcccggtgccggacgccatcgcgcccggctgcgtactgaagtttgttgcttaaaaggagagagagatgaatcaggttgctgttgtcattggcggtggacaaaccttaggagagtttctgtgccgcgggctggccgccgaaggctaccgcgtggcggtggtcgatattcagagcgaaaaagccagccgcgtcgcccaggagattaacgctgagtatggcgaaggtatggcgtacggcttcggcgccgacgccaccagcgaggccagcgtcaccgccctggcccacggggtggatgagattttttcgcgcgtcgacctgctggtgtacagcgccgggatcgccaaggcggcgtttattagcgacttcgcgctgggggatttcgaccgctcgctgcaggtcaatctggtgggctattttctctgcgcccgcgagttctcgcggctgatgatccgcgacggtattaaggggcggatcattcagatcaactcgaaatccggcaaagtcggcagtaagcacaactccggctacagcgcggcgaagttcggcggcgtcgggctgacccagtcgctggcgctggatctggcggaatatggcattaccgtgcattcgctgatgctcggcaatctgctgaagtcgccgatgttccagtcgctgctgccgcagtatgccaccaagctcggtatcgatgagagcgaagtcgagcagtactacatcgacaaggtgccgctgaagcgcggctgcgaatatcaggatgtgctgaacgtattgatgttttacgctagcccacaggcgtcgtactgcaccgggcagtcgatcaacgtcaccggcggccaggtgatgttttaacaggttcccggatggcgctgcgcttatccgggctacaaaactgtaggtcgggtaaggcgttagccgccacccgacaaaaaacggcaccgcgggtcgctcgggttaggcgctcgcgccgtgacctgggctgttcccgccccccttaaggagagacctatggttactgcattaatcatcgtcgccgccatcgcctggcttacccagctggcctttggcggctggcagatccgccgcttcaatcgcgcctttgatagcctgtgccagcaggggcgggtgggcgtcggccgctccgccgggcgctttcaaccgcgcgccatcgtcgccatcgccgtcgatgataacgaccgcattagcgacacgctgctgatgaaaggcttcaccattttcgccagtccgcaaaagatcccggctctggcaggcaaacatattgcggaattgcagcctgatgtgatctttccccatgatccgcgctgtcagaatgcactatcattagcgcttaatccgaaacatggataatttcgttgtaaaagtaaatatcttgcgaaattatcacttcgaaacttaaacgcaggatagacgcctatgaaaccacgtcagcgccaggcagccattctcgagttcctgcagtcgcagggaaaatgctcggtcgaagagctggcgcaacacttcgataccactggcaccaccatccgcaaggatctggtcacgctggaaaacgccggcaccgtcattcgcacctacggtggcgtggtactcaacaaggatgaagccgatccgccgattgaccataaaacgctgatcaacacccataaaaaagcgcagattgccgaggccgccgtgcgatacatccacgatggcgattcaattatcctcgacgccggcagcaccgtgctgcagatggtgccattgctgagtcacttcaataacatcacggtgatgaccaacagcctgcatatcgtcaacgcgctatcagagttcgataacgagcagaccatcctgatgccgggcggcaccttccgtaaaaaatcggcctcttttcacggccagctggcggaaaacgccttcgaacagttcagcttcgacaagctgtttatgggcaccgacggtatcgatctgaacgccggagtcactacctttaatgaggtctataccgtcagcaaagcgatgtgcaacgccgcccgcgaagtgatcctgatggccgactcatccaagtttggtcgtaaaagccccaatattgtctgcggccttgaacgcgtggataaattgattaccgatgccgatattgacccggaattccagcgggcgctggaagccaaaggcatagcagtcattattactggagaacatcatgagtaactttttgttagaggccggacgccagaccctgatgcttgagctgcaggaggcgagccgcctgccggagcgcctgggcgacgacttcatccgcgcggcggaaaccattatccactgcgagggcaaactgattgtctccggtatcggtaaatccggccacatcggtaaaaagctggcggcaaccttcgccagcaccggcaccccggcctttttcgtccatccggcggaagccctgcacggcgatctcggcatgctcgatagccgcgacgtgatgctgtttatctcctactccggtagcgcgaaagagctggatctcatcgtgccgcggctggaagaaaaaggcattccgctgctggcgatgaccggcaaatccacctcgccgctggcgctggcggcgaaagcggtgctggatatcgccgtggagcgcgaggcctgcccgatgcatctggcgccaacctccagcaccgtcaacacgctgatgctgggcgacgcgttggcgatggcggtgatgcaggcgcgcggtttcaatgaagaggatttcgcccgttcccacccggcgggcgccctcggcgcgcggctgctgaacaaagtgcatcacctgatgcgtcgtgatgaagaagtgccgcgggtcaataccgaggccaatgtcatggacgctatgctcgaactaagccgaaccggactcggcctggtggcggtctgcgatgaagccaaccgcgtgcagggcgttttcaccgacggcgacctgcgccgctggctggttgctggcggtacgctcaacgatggcgtcactcgggcgatgacccgcaacggcgtaacgctgcaggcggatagccgcgcggtggaagccaaagagcggctgatgaaacacaaaatcagcgccgcgccggtagtggatgagaacggccaactggtcggcgccattaacctgcagaacttttaccaggcggggatcctttaagccccagacgtttcgccagccgatgcaggttggcgacgtccagttccagcgctcgggcggtcgccgcccagttgccctggttcgcctccagcgcacggctaatggcttctcgctgaaaagagtcggtcgcctcgcgcagattgatgtttcccgtcgcgggcgccgctgccgccgtctcagtcggcaacatcggcgccgccaccgcaaactggaaatgctgcggctccaggaccacttcatcaccggcctgggtggcccgcgccagcaccaccgcccgatggatagcatgctccagttcgcgcacgttgcctggccaggaccactgctgcagccggtttcgcgccgcctcagccaaaatgacccgcgccagccccatccgcaggcggcactgctcgcagaaatagcccgccagcagcaccacgtcactttcccgctcgcgtagcggcggaaccgacagcgggaagacgctcagccgatggtacagatcggcgcgaaagcgcccttccaccacctcctggcgcagatcgcggttcgtcgccgccagcacccgcacatcgacccgcaggctgcggtcatcgccgacgcgctgaatatcgccatactgcagcacgcgcagcagtttggcctgcagcgccagcgacagttcgccgatttcgtcaagaaacagggtgccgttatccgccatctcaaatttaccgctgcggttgctgatagccccggtaaatgcccctttcacatggccgaacagctcgctctccgctacgctttccggcagcgccgcgcagttgaggtacaccagcgggttggcggctcgcggcgatccctggtgcactgccttcgccaccagctctttgccggtgccggtttcgccgctgatcagcacgtttaaatccgaggcggcgacgatatcgatctcttttttcagctgcagcatgggccccgacaggccgatgatctcctggcgctccggcagcgggtaattcaccgcctgcgccggcaggacgttttgcgcttcaaggcgggcgataagcagcgcattattcagcgccccggccaccagcgcggcaatcagccgcagctcttcatcgctgaagctatcgaaacgatcggcatccatgccgtccagggtcagcgcgccaatcagcgtctgcccggcaaacagcggcagtcccacgcaggcatggactttgaggctctcatgaccggggatcagcccgtcataggggtcgggcaggtcgctatccgccgggaagcgcaccacatccccggcgcgcgcaatcgcctccagccgcgggtgtccttccagggcaaagcgccgaccgagcacatcctgcgccaggccatcgatcgccagcggcacaaactgatgcgcctcatagcgcagcagcgccgaggcatcgcagccaagaatttgccgcagggtagtaatcaggcgcgaaaagcggtcggtgtgaccaatatcgctttgtaaatctatggcgattctcgccagctcgtcgacggaaaaactcattgccgctccattgtcattttgacaatactcattgtcatatcgactattttaaccattgtcattttgacaacaaccaaaatcagaaaaaattaaaaacagataattatcaattaattaaaaagttggcacgcaacttgatataagccagtcaactgagtttaaacacactgtattgattgaggttgctatgtctattgtggtgaaaaataacattctttgggttggccaacgtgactgggaagtgcgtgatttccacggcaccgaatataaaacgctgcgcggcagcagctacaacagctatctcatccgcgaagagaaaaacgtgctgatcgataccgtcgatcataaattcagccgcgagttcgtacagaacctgcgccgcgaaatcgacctcgccgacctcgactatatcgtcattaaccacgccgaagaggaccatgccggcgcgctgaccgaactgatgatgcagatcccggatacgccgatctactgcaccgccaacgccatcgactcgatcaacggccaccatcatcatccggagtggaacttccacgtggtgaaaaccggcgatactctcgacatcggtaacggtaaacagctgatcttcgtggaaacgccgatgctgcactggccggacagcatgatgacctacctgaccggcgacgcggtgctgttcagcaacgacgccttcggccagcactattgcgacgaacatctgttcaacgatgaagtggaccagactgaactgtacgaacagtgccagcgctactacgccaacatcctgacgcccttcagccgcctggtgacgccgaaaattactgaaatcctcggcttcaacctgccggtggagatgattgccacctcccacggcgtggtctggcgcgataacccgacgcaaatcgtcgagaaatacctcgagtgggcggcagattatcaggaagatcgcatcaccatcttctacgacaccatgtccaataatacccgcatgatggcggacgccattgcccaggggatcaccgaggttgacccacaggtagcggtgaaaatctttaacgtcgcccgcagcgacaaaaacgacatcctcaccaatgttttccgctcgaaaggcgtacttgtcggcacgtccaccatgaacaacgtgatgatgccgaaaatcgccgggctggtggaagagatgaccgggctgcgttttcgcaataaacgcgccagcgcctttggctcgcacggctggagcggcggcgcggtagaccgcctgtccacccgcctgcaggatgccggctttgagatgtcgctgagcctgaaagccaaatggcgcccggatatcgacgcgctggagctgtgccgccaacacggtcgcgacatcgcccgccagtgggccctctcgccgctgccggttgctgaagcagcgacaacgccggaaccacaggactgcgcctgtgccgccgccgcggccgccgatctcggtcccatgatgcagtgcagcgtgtgccagtgggtctatgacccggcgaaaggcgaacctaaccaggatgtacagccgggtacgccgtggagtgaagtgccggacaatttcctctgccctgagtgttctcttggcaaagatgtctttgacgtactggcgacggaggcaaaatgagtgatggcatcgtcatcatcggctcgggcttcgcggcccgccagctggtgaaaaatattcgtaagcaggatgcgcaaatcccgctgaccctcatcgccgccgatagcatggatgaatacaacaaaccggacctcagccatgtcatcagccgcggacagaaggccgacgatctgaccctgcaaagtgccggcgagttcgccgagcagtacactctgcgtctgtttccccatacctgggtaagcgatatcgacgccgaaaaccggttagtgaagagccacgataaccagtggcgctacgacaaactggtgctggccaccggcgcgacgccgtttatcccgtcggtgccggggcgcgagctgatgctaacgctcaatagccagcgcgaatatggcgcggcgcagagccagctgcacgacgcgaagcgcgtgctgatcgtcggcggcggcctgattggctgcgaactggcgatggatttctgccgcgccggtaaagcggtaacggtagtcgataactccgccagcgtgctggcggcgctgatgccgccggaggccagcagccgcctgcagcatcggctcaccgagatgggcgtacatctgatgctgaaaacgcagctggaggggctggagcaaaccgccgacggcattcgcgtcagtctcgatcgccagcgcgcgataaccgtcgatgcggtggtggccgccgccggcctgcgcccggaaacgtcgctggcgcgccacgccggactgcagattaaccgcggtattgtggtcaatagccagctgcaaaccagcgacccggcgatttatgcgctcggcgactgtgcggaaatcaacggcgtggtactgccgttcctgcagccgattttactcagcgccatgtgcctgagtaaaaatctgctggcgcaggcgggagaactcaagctgccgccaatgctggtgaaggtgaaaaccccggatctgccgctgcatctggccggcgacacccgccgcgacgatctgacgtggaatatcgtggccgccaaagaggggctggtggcgaaaggcgtggatgccgaaaaccagctgcgggcctttgtggtgagtgaagacaaaatgaaggaagcctttgcgctgctcaaacaactggtaagttgatggttttcccggcttgcggcgtaaacgccttagccgggctacggtattgtcctggtagcccggctaagcgcagcgcaagccgggaacatatccagcctagcgcgccagattgtcgtagccgcgccagcgatagttaagcaccgatagcgcccaacaggcgacaaacaacccgaccaccacaaatccggcgtcgccgaggttgtcgtttaacgcccctacccagcgccatattccgccgctgagcgcaaacttatccatcagcaggcccagcgcttccaggccgccgataaacagcgccaccaccaccgaggtgccggtgatggtcatgttgtaatagagcttgcgctgcggtttgctgaacgcccagccgtaggcgccgaccatcagcacgttatcgagggtatccaccagcgccataccactggcgaacagcgccgggaagaccataatcgaccagacggaaatcccgctcgacgcaccggcggcggagatacccagtacgccgatttcggtggcggtatcaaaaccgaggccaaacaggaaaccgaccaggtacatctgccagctgcggcttatcagacggaaggtcttgccaaacagccagctcatcaccccgccgccgctgacgatttcgtcgctcaccggctctccgcgcttccatgcccgaaagctgcgccacacgctgcgtaaaatcaccaggttgataaaggccatcgccagtaaaaacagggccgacacggcggtgccgataacgctaccggtatcatgcagccagctcatctgcgtgctgaaggcggtggcggtcgcggcaatcgccgccgaggccagcaccacaatcgatgagtggcccagcgaaaaccacgccccgacggcgaaaggccgccgcccctgctgcatcatcttgcgggtcacgttatcaatcgccgcaatatggtcggcgtccaccgcgtggcgcaggccgtagccccaggccagcaggctggcggccatcagcgcgccgctgtcgccaaaggcctgcagcgcccagcaccaggccagaaaattcgccgcgatcaaccccagcaccagacccgcggcgcgcggctgctggcgtaaaactgtcattatcatggttgtattccttgagcctgcccgcgggcggcggcgatcaccgcctggccataggcgattgcgccgtcgccggccggcaactgctgtgcaaacagcagagtaaaatccgccagataaaaggtcaatcgcgccgccagcaggcggttatgcagcaccccgccgctgcagaccatcgtgtcgatgccgcggacggtggcgcagtcgcgggccatcgccgccagtccacaggccagggcgtcgtggaatgcccaggctttctgcgccggagtcgcctgccagctcagccattgccgccagaaggtcgctaaatccagcgcgtcgtcgcgccacggcagcgtaaccgggtggctgacgccggggcagctggcggccagcgcctccagccgacaggccgcttcgccttcatagctcaggctctccggcgcgcaatccagggcgcaggcaacggcatcaaacagccgtccgcaggatgaagcgcgcggcgcgttaatcccgcgctcgatggcctgcgccagcagcggccagttgcgctggcgcagggtggcggcctgcggataatcctgccagtcagggacaaaggccaaacagtgggccagcaaatttcgccacggctggcgtgccgccaggtccccccctggcagcgcgacggccggcagcccgccaagatgttcgcattcgcgatagttgacccgcaggcactccccgccccacagcgcgccgttctcccccataccaataccgtcgagtgtcagggcgataacgtccccgccgtcaagcggccagcggtgctccgccaggcacgccgcggcgtgggcatggtgatgcagcactgtctccagcggcaggggcagggaggccgcccactgcgttgagcgatagccgggatgggcatcaaccaccacccgctgcggcacaaacgcgtaaatgctctgcatcagctgcagggcgctgcgccactgctgttcaacaccttcctcgccaagatcgccaaagtgctggctcagcaccgcttcgctgccgcgcgccaggcagaaggtatttttcatatccgcgccgagagccagcagcggcgggatgtctcctagccccggcggcagcggcagcgcgtccgggacgtagccccgggcgcggcgcagcatttcaccgcttgagcgcaccagtgaatcatccatccgctgtacgatgtcgcgattatgcaagagaaagccgtcggcaatgtcggctaactcattgagcgcctgagcattacttaacgccggcggacggccgctaaggttgccggaggtcattacgatggggcgcgccagcccctgcagaagcaaatgctgcagcggattagacggcagcatcaccccaacttccgcaagccctggcgctatttcgtcgcacaggccggagacctgcgctttggcaatcagtacgatgggcgccgccggggagcccatcagcgccgcagcggcggcgggtaagcccgttgccgtcggcagcattaccgccagcggttttgccgggcggtgttttcgcgcccgcagcgtggcaacggctgcggggttaccggcatcgcaggccagatgaaagccgccgatgccttttatcgccacgatgtcgcccgccgccagccgggcgatagccgcctgcagcgccgcctcgccgtccagcgtttccccctctgcccgccattccagtcgcggcccgcagtcggggcaggccaccggctgagcgtgaaaacggcgatcggcaggatcgcggaattccgcttcacaaggggaacagagcgggaacggcgccattgcggtgaagggccggtcgtagggcatggcgcgaataatggtcaaccgcgggccgcagtgggtacagttgataaaggggtagcggtagcggcgtgcccggggatcgttcatctccgcgaggcacgccgggcaggtcgcggcatcgggcacaatctgagtccgcatccgtcccgccccgctctcgcggatggtgaaatcctgcggcgtggccgcccagcgatagggaatgcaggcggtactgtcgatccgcgccagcggcgggcagtggtcagccagagcggcagtaaaaccgtcgtcgcccccgaccagccgcaccagtacgccgtcgccgtcgttacagacatcgccgcagcgggcctgcgcccgggccagctgccagacaaaggggcggaaaccgaccccctgcactttaccgcgaatgcggatttgcaccccgttcatgccttgacttaccaggccagcgccgtacggcgacgtttctcgatattcatctgctcaagtttgttgcggtcaacgcacaccagggcgtgcgtcgggcacacttccatgcaggccggaccgctctcgcggtggaagcagagatcgcacttgttggcttcggctttttccgccacgacgttcagtccggcgccgctatggcggatcaccgggcgcaccaccacctccatcgccccgtacgggcaggcgacgacgcaggttttgcagccgatgcaacgctcctgcatcacatggacaaagcctttatcacggctgatggcgccgttcgggcagacgttggcgcagggggcgtcttcacactgacggcaggcggtcgccgtggaaacattgacccctttgatcacgtgaatacgcggctgaaaggtgtgaggcgtcagggaggcgcagtcctgatgttcctgatgggataccacgcaggccacttcgcaagtgcgacagccgatacatttgctcgcatcggcgataatgaaacggttcatccatttctccagcagtaagaaggttacgcgccggagtatgcataatacgttccaagtttttaatatattgattataaagactattatagctgggctttgctgtcatcgtcagtagtgacgatgacagctgacgacgtcaggcacaggggcccgccaccagcgactcgcgttcaatcagcgctccgggaaagctttgctgaaagttgaattccccgccatccagcataaagatcagccgattgatgctctctttaatcatctccgtcaccggcacccggacgctggcgagcgacggcaccatatacggcgcaagagcaatatcgtcaaaccccaccaccgagacctgttccggcaccttaacgcccagctggtgaagctgcttcatcgccccgatggccatatcgtcattgctcgccactagcgcgctgtaggtaaccccgcgctgacgcaggctctccacccccgccgccccggtttccggcgtccagcgcccttcggcgataagcgcctcgttcagggcgatgccgtggccagccagcgcgtctttgtagccggcgaggcgttcgacgccggtgggcgagtcaagggagccggtaataaaggcgatatcgcgatggccaagcgcaatcagccgctccactacccgcatcgccgaggctttttgatcggaccagacgcagtggctggcgtggcggcgcaggcggcgattaagcaccatgatcggctgcgagtggttctcaacgatctcgtccatctcatcaacggtgagaaagcgcgggtagatgatgatcgcatcgcagcgcagatccagcaggtactggatcgcctcccgctcctcttgcgcgctgtgcttgccgtcggccaggatcagctgccgccctttatcctccgtcatccgcgccacgtgatacagcagttcgctaaaatagacgccgtggtacagggtattggtcaccaccaggccgagggtttgcgtggttttggtcgccaggttgcgcgccagcagatttggccggtagccgctctccgccaccgccttaaacacccggtctttggtctcctggctgacatagccgttgcccgacagcacccgcgaaacggtcgccttcgatacccccgcgcgctttgcgacctccagcatcgttgccatgtgattcttcctgttgcaaaagttgcaggcagtgtactgcacgtttcccgcttttacagcactcccctgttcaccaccgcgatccggctcacggcgacgcttagcgatcaaaatcacaaaattgagatcatgtttttttatttcttgtgcaattaaatgaaactcaccatgattttgtggaaccggtttcctataaaaacatggtatcgcccggcgatgcggggcggtggcagattagtaccctattgataaacaggataaaatccgatgtcgaaaaattatgcagccctggcgcaacagatagtcgcggcaatcggcggggtcgacaacgtcgccgccgttacccactgcatgacccgtctgcgcttcgtggttaaagacgacgaacaggtcgatagctctaccctgaaaggcctggccggggtgctcggcgtcgtgcgcagcgataaccagtgccaggtgatcatcggcaacactgtctcccaggcctaccgcgaggtggtgaatctgctgcctggcgacctgcgcccggctgagccgcagggcaaagcgccgctaaccctgaaacgcatcggcgccgggatccttgacgcgctgatcggcaccatgtcgccgctgatcccggcgattatcggcggatcgatggtcaagctgctggcgatgatcctcgagatgagcggcgcgttgccgaaaggctcgccgacgctgaccctgctggcgcttatcggcgacggcgcatttttcttcctgccgctgatggtggccgcctccgcggcggtgaaattcaaaactaatatgtcgctggctatcgccatcgccggggtgctggtgcatcctgggtttatcgaattgatggccaaagccgcccagggagaacacgttgaattcgcctttattccggttaccgcggtgaaatacacctacacggtgatcccggcgctggtgatgacctggtgcctgtcgtatatcgagcgctgggtggatcgcattaccccggcggtgacgaaaaactttctgaagccgatgctgatcgtgttgatcgccgccccgctggcgatcctgctgattggcccgctgggcatctggatcggcagcgccatttccgcgctggtgtatacgatccacagctatctcggctggctgtcggtggcgatcatgggcgggctgtggccgctgttggtgatgaccggtatgcaccgcgtctttacgccgaccatcattcagaccatcgccgaaaccggcaaagagggtatggtgatgccatcggagatcggcgccaacctgtcgctcggcggctcttcgctggcggtagcgtggaaaaccaaaaacccggagctgcgccagacggcgctggccgccgcggcatcggcgattctggccgggatttccgaaccggcgctgtacggcgtggcggtgcgcctgaagcgcccgctgatcgccagcttaatcagcggctttatctgcggcgcggtggcaggcattgccggactggccagccattcgatggcggcgccggggctgtttaccagcgtgcagtttttcgatccggccaatccaatgaccatcgtctgggtgtttggcgtgatggcgctgtcggtggtgctgtcgtttgccctgacgctgatccttggctttgaggacattcccgttgagcaggccgctgccgacgccagagcgcgccaggccagggcccaggcatcccacgcctgaatacactattgataatgaggtaatgcatggcgagtttcccacagggatttttatggggcggcgcactggccgccaaccagtctgaaggcgcttatcttgaaggcggtaaggggctgaccaccgtggatacccttccccacggcgcccatcgcctgccggtaaaattaggcctggagaagcgctttacgctgcgtggagacgaattttaccccagccaccaggcgatcgatttttaccatcgctataaagaagatatcgccctgatggccgagatggggttcagcgtctttcgcacctccatcgcctggagccgcctgttcccacgcggcgacgaacagcagccgaatccgcagggcatcgccttctatcgctcactgttcgaggagtgcaaaaagcacggtatcgagccgctggtcaccctgtgccattttgacgtgccgatgcatctggtgatggagtacggctcctggcgcaaccgcaaaatggtggattttttcagccactacgcccgcacctgctttgaagcttttgacggcctggtgaaatactggctcaccttcaatgaaatcaacatcatgctgcacagcccctactccggcgccggtctggtgtttgaagagggtgaaaaccaggagcaggtgaagtatcaggccgcgcatcacgagctggtggccagcgcgctggcgacgaaaatcgcccatgagattaacccgcaaaatcaggtcggctgtatgctggccggcggtaatttctacccttactcctgcaagccggaagatgtatggatggcgctggagaaggaccgcgaaaacctgttctttatcgatgtccaggcccgcggcgcctatccggtgtgggccgcgcgggtgttccgggaaaaaggggtcacgattgcgaaacagccgggcgatgacgagatcctcaaaaacaccgtcgatttcgtctcctttagctactacgcgtcgcgctgcgcctcggcggagatgaacgccagcaacaccaatgccgccaacatcgtcaagtcgctgaagaacccgcacattccggccagcgaatggggctggggcatcgacccgctgggcctgcgcatcaccatgaacatgatgtacgaccgctatcagaaaccgctgttcctggtggaaaacgggcttggcgcccgcgatgagatcgatgccaatggggacatcaatgacgactatcgcatcagctacctgcgcgagcacatcagggcgatgcgcgatgctatcggcgacggcattccggtgatgggctacaccagctggggctgcatcgatctggtctcggcgtccaccggcgagatgagcaagcgctacggctttgtctatgtcgatcgcgacgatgccggcaacggcaccctggcgcgtaagcgtaaaaagtcattcttctggtaccagaaggtgatagccagtaacggcgccgatctcgactaagcaccctcgcccacgcgcgcccgttccccgcgataaccgggggacggacgtcggctatctgttgcatccattacatgcttttttctcgagcctgattccagtttctggtttgccacctgtttacaataactggtattttatccagtacttttacaggggtatcttcagcaaggagcacatcatgagcgcacagcaccctaccgcagccagagggatagccagggccattcgccagttaaccgtgggatatgtcagaaaacgccatgaggatcgcaaaacgcgggagacgcggcgctacacccgccacgcggcattaagcttaaacggcgactggctggagcaggcggggtttccggtcggcacgcaggtcagagtctcggtgtcgcccggtaaattagtgatagagaatcttgagctggcagcgccgggaacggggctcccttccggccagtcgtgcgccggcggagagcccggttcgccgcagggctagtcgtccgcggcctccagctgagtaaagccgcccttgccctgccagcctgccagctgctgatacacccgggcaacggcctctttcaccggctgggtcatcggataataaaaaccgacgatatccggctgaatgccgaggaaaatcacctcgccgacgtcttctttcagctgatcgaccagatagttgagcggcatgttatgggtggtcatcataaacatctcggcgatgtcgtcgggatcgatgatgcgaatgtcgccggggtttaggcccatatcggtggcatcgacaatcagcaggcgttcggggcgtaattcgcggatcgccacgatgtcgttttccggcgcgctgccgccgtcgatgaccacccactggccggccgggttagccgcgcacatctccgccagcagcgggccggcgccgtcgtcgcccatcatgctgttgccgacacagagtaaaacgtcagtcacgtaatctcctcaccatcaggtagatggcgctctcctggtgaatatcatgcagcatgctgagcagggttttgctccacgcctgctgctgcggggtctgcgcagactgcgctttatcaaaggcgttggccagcatcgccacatgactgctgtcgatgacgatttcgccatacttcggcacgccctccattttgcgccgcgcggcgcttccggcctcaagggtggcgatccatgccagatacgcgtcccacgggcagctcagcgccgcctccagacagtcgatgacgccgaggtggtggccaatcgccaggctgtaatagaccacctgctgcgcctgatccggcgtggcgtcgttctcatcaataaatttacggctcagctgactgaacaccaccgtctcgctcatcggatacgcgccccctcgaccacctggttgagatgggtgacgatctcggtcagacgcggatctttctccgcctccagccagcgcagcacctgactgtcgccctggccaagcagacgcatatagtcatcggcaatctgccgtccatagcgatagcccgccagacgccgcgcttcgcgatcgatgcgcacccgcagaggctgcaccatatcggcatgcagcagctcggtcggctgttcgtcgagctcacccggcagacgggcatgaattttctgctccagcaggccaagcgccatggcgaagccgtacagcgtggcggctggcgtcggcgggcagcccggaatatagacgtcgaccggtacgattttatcggtaccgccccagacgcagtacaggtcgtggaagatgccgccgctgttgccgcaggcgccgtaggagatacagatcttcggatccggcgccgactgccaggcgcgcagcgccggggagcgcatcgcgcgagtcactgccccggtaaacaacagaatatcggcatggcgcggcgaaggcaccaccttaatcccgaagcgttcagcgtcgaacagcggcgaaagggtggcgaaaatttcgatttcgcagccgttgcagccgccacagtcgacgcggtagacgtaggccgaacgtttaatcttcttcagtagcgaggccttcatgctggcgatggattcatccaccgtcatcggcacgggaatgccgttttcatcgcgcgggccaagtaaagtactcatcagctggcctccctcatatggcgggtcagttcaatacgatcggacggcaccaggcatttctggcgcttgcattccgggcaggtttcgaagctttcgcggtgcagctcggcgcgggtatcgccgttatgcttgagcagcgcgatggcgtagtcgatctccttctgcaccgcgaacggacgctggcactcccggcagtggcagatagcgaagcgcgactgctggaggaaatcctctttcttccacaccgccagctcatactccggcgacagcttaatcgccgccgtcgggcacacctcttcacagcgaccgcagaagatgcagcgcccgagattgaactgccacgccagctggttagtggccagatcgatctcgaccgtcagggcgttcgacgggcaggcgttcacgcaggccgcgcagccgatacactgctgtggcgtatgctccggcttgccgcgaaagtttttgtccaccggcatcggctccagcgggtaggcgtgcgtcgcggtgccggtcttaataacttttttaataaaggtaaacatggcgattccttatttcagcggcgagtttttacgctcgatgctgtagcgctccagctctttgtatggcaccactttgctcttcttcttgcgtacatcgaccacggtcatgcggtcagtacaggagtagcacgggtcgaggctgccgatgatcagcggcgcatcggaaacggtgttgccgcgcagcatatagcgcagggtcggccagttggcgtaagtcgccgcccggcagcgccagcggtacagtttctggttgtcgccggtcatgctccagtggatatcgtcgccgcgcggcgcctcggagaagcccagcgcgaagcggtgcggaatataggtgaacccctccaccatcagcgggccgcccggcaggttatcgagaccgaaatcaatcatattcagcgcggtgtaaacctcgttgatccgcaccttgaggcgagatatcacgtcgcagccctgttcgctgtgaacttccatcggcagcaggccgtaaccgacaaacgggtggtcggcgcgggtgtcgcgggcgtggccgctggcgcgcaccatcgggccgacgttgctgaagtcgcgggcgatttccggatccagacggccaataccgacggtacgctgttccatattcggcgtgctgagcagcatatccaccagctcctgcacgtcgcgacgcatctgctgcgccagctgacgggtctggatcatgtcctctttcagcaagtcgcggcggatcccgccgatcaggttcaggccgtaggttttacgcgcgccggtaaggatctctgccatcttcatcgaggtttcgcgcacgcggaagaactgcataaagccggagtcaaagccggtaaagtggcaggccagaccgaggttcagcaggtgcgagtgcaggcgttccacctccagcagaatggcgcggatcatctgcgcccgctccggcaccacgatgcccatcgcgttctccaccgaggtggtgtaagcggtgctgtgggcgaagccgcagatgccgcacacccggtccgacaggaaggtcacttcgttataacccatgcgggtttccgccagcttttccatcccgcgatggacgtagaacaggcggtagtcggcgtcgataatgttctcgccgtcaacgaacaggcggaagtggccaggttcatcagaggtgacgtgcagcgggccaatcggcaccacgttgtttttcttgctgccgagctcgttaataaactcgtaggtttcggcgtcggtggtcggcgccggacgctggcgataatccatgctgtctttgcgcagcggatagagttcgtccggccagtcgtccggcagcaccagccggcgttcgtccggcaggccgaccggcaccaggccgtacatatcacgcacttcgcgctcgccccataccgccgccgggacgcgcggcgtcaccgacgggtattccggtttgttggcgtccacttccacgcgcacggtgatccagcatttggtgccctgctccatcgacagcacgtaatagaccgcgtagtggccgttgagcttacgttcatcgttgccgaacagcaccgacagccagccgccctgctggtagtagagaaactccaccacttccggcaggtagttgaccttcacggtgatggttaactggtctttagtctgccaggcttcgtccagcaccacgccgggaaaggcctggtgcagcgccgcaaggtagtgttgaccgattttttcttcagacatgctcaaactctcttaatcacgccaccagcaaggagacgaaagctaaaaaggcgaaaccaaacccggcccaggtgacgcgggaggtggcacaaaaacgcagacgcgccatgctgttttcaaacagcgcgataattagcaccccaaccaccagcttaacgatggcgaccaccagcgccagcagcaggccgccgacgctgaagctggtcatctggccccacggaaagaagaccccgacaaacatctgcagcaccaccagctgtttgaggctgatgccccacttcaggatgccaaagccgctgccgctgtattccgacagcggcccttcctgcagctcctgctccgcttccgccagatcgaacggcagtttgcccatctcgataaaggtggcgaaggcgcaggcgcataacgccagaatcagtggaatgctgcgcgacgccggccagtggtaaagggtatcggtgatggcgctgatatgggtcgagccggcgacctgcgccgccacccacaggcccaacagcaggatcggctccaccagcacgccgagcatcgcttcgcgactgctgcccagcgcggtaaacgggctgccggtgtccagaccggaaatggcaaagaagaaacgggcgatggcgaacaggtagatcagggtgatgagatcccccagcaccggcagcggggagtctaccgtcaccaccggcagcgcggtggcgatggtcagcatcacgcccaccatgacgtacggcgtcaggcgaaacacccagcccgaggcgtcaggaccgacgctctggcggcccagcagtttcaggatatcgcgatactcctgcagtacccccggtccacggcggttatgcagccgcgcgcgggcgacgcgaacgatcccggacaacagcggcgcgacggcaaacagcaccagcgcctgtagcaatgcaattaacagactcattctcaggctcctcgcgaaatgacaatcaccaccagcaccgccagctcaaccagcgcgatcccgcgcagcagcgccggcgccgaggccgattgccagcccggcaccagacgcaccgggttcagccagtgacgcagcttcagcaacggcgcaaaggcctctttcaccggcatggcaaagccgtgggccgttaccaccatcgactgctcgtggtcgtaaccgcagacccacgccgcgccgcgcgagcgcgccgccaggcgatcgcctttaaagaagatcatcagcaggaacggcagcagcgggcaggcgataagcagcagcgcgatcatcggctgcgacaccacgctcgttacctgagcctgcaccgggaaggcgccgctcaccagcggcagcagccacggcgcggcgatgccgccaacgaggcagaaaaccgccgccagcaccacgctcagggtcatcagccagggggcgcaggtggcgttttccgcctctttcgtccgcggcgcgccgaggaaggtcacgccatagactttcgccatacacatcaccgccagtgcgccagtgatcgccaggccaacggccagtagcggccccagcagacggccaataaacaggtcgccagtgctcattttgaagaaggattgatagataacccattcgccggcgaagccgttcagcggcggcagggccgccattgccatcagccccaccagcatggcgagggagatcagcggcatttttttaccgatgccgcccagcttctcgatatcgcgatggccggtgcggaaccacaccgctccggcaccgaggaacagcgtggttttgaacaggctgtggttaatcaggtgatacatgccgccgataaagcccagcaccatcagcgtgctgttgcgggtcgccacgccggtgacgaaggcgcccagccccagcaggataatgccgatattctccagggtgtgataggccagcaggcgctgaatgttatgctccatcagcgcatacagtccgccgataaaggcggtgatcatccccagcgccagcagcatcacgccccaccacagcggcggcacgccgccggccagcgaaacggtcagcatgccgtacagaccaaccttcattaccaccgtggaaaacagcgcggcggccggcgcgctggccccggcgtgagcctgcggcgcccagccgtgcagcgggatcgccccggccagcagggcgaaccccaccagacccggcagccagagcagcgggttctgcatcatatccaccgcctgaaggttgatctgcgccagctcgagggtgccgtaggttgaccacaccagccagcaggtccaggccatcagcagagtaccgagacgccccagggcaaaccacagcttaccggaggcggcgcagccggtgagaaacgccgcgcagagcgccatgatctccgccatcaccaccagtgaaccgatattggtcaccaccaccgcgcaggtcgcggcggccagcagcaggttgaccagcgggccgttggccttcacctgcgggtggcgatgccagctaatattaaacagcgacaccggcagcgccgacaggccgatggccagcagccacagcgcgttgacgccccccacccgtatcgtcaggtggagaaactgcagcatgccgccgtggatccgctccggcatcagcagcgcggcgccgccggcgaccaccagcatggcgctggccaccgcgccgccgatcccggcaatggcgccgctgagcggtttgcgcatggcaaacagaaaggccagtacggcgctggcggcataccacgccaccgcctgattcactaatccaattacactcattccctctccccctgttgcgcctggaacagcgacaagtcgccaaggtcggtattaaaggtcagccggcgtttacgcttgctggcctgggcgatatcacggctatccaccagcatcagcgcgttggtcggacaggtccgcacgcaggccgggccctggtcatcgaagtggcagaggtcgcatttcacggcaatagcgcgcacgcccggtacccagtcgagcagcgagctgacgcgcgccggcgccggcggcgcggggggcgccagccgggtattggcattcgccgggatatccagcgggcggctgccggaaaattcaatggcgccgaacgggcaggcaatgccgcacagtttgcagcttacgcacaggctctcgttgagctggaccgcgccatcgacgcgctggatggcgttaaccgggcagacggtggcgcagggagcatcttcacagtggtggcacatctgcggtgccgattctttttcattacgcatcacctgcagccgcggcatagcctgcaggccgtgctggcgatgcgtctcagagcaggcggcttcgcaggtgcggcagccgatacagacagttgagtcagcaattacaaaacggttcaccgggtcatcctcgggtgaaagtcatttttgacgaaatcaggttgcgcaggtgtcattttcgacacgtgtcgacaccttacgatcagtgggtcagcgccagatggcttaaatccaccggttggtcttgttccatggcgtcatacagacggtcatagacggtggcgataatcgccagatagtgctccagcacctggtcgcgggagcggttgctgatgcggccgtccaccgtgccatccattgcgagggtggcctgagcaatcagatacttatcaccgccgtttttgttttcgacgtagtactcgatggtgtggctgttgaagccttccgcgagggcgacgaacacctgaaaatggccgaacagcacgaagcacagctctttgtccggcgcgcagctcatcgcgtgatgcaggcgggccttcgacaaggtgatcccctgaaccagcgagttacagtagatgtgccactgctcctgctgctgccggtgacggtcggcgatgtaatccgccttttcacttatttcccaaatagtcatatcggtttctccgtagcatgagatgcaccctctaagcatttttcatgccaggttttatttaattgatttaactatttttttatatcgacctctgccgatacgacatgtcgatgacagccccggggcgtcgacatcgacattgactgccacgacgatttcattctggcatcgttattgcataaaaggcgcatcgcgatacggaggcgactatgcacgaaatcaccctcagccagcgggcgctggaaattattgaacaacaggcgcagcaggccggcgcgcggcgggttaccggcgtgtggctcaaggtcggcgcattttcctgcgtggaagccagcgccctgaccttctgctttgagctggtctgccgcggcacgctggcggaggggtgcgaactgcatatcgccgaacaacaggctgaatgctggtgcgatcgctgtcagcagtacgtccatcttgtctcgcagcacgttcgccgctgcccgcactgcaataacgaccagctgcagatcgtggcggatgacggcttacagattcagcgtttagaattggagtaaattatgtgtacaacatgcggctgtggcgaaggcaacctctatattgaaggagacgaacgaaacccgcattccgcgttccgcagcgcccccttcgcgcccgccccacgccagacgatgaccatcaccggtgtcaaaatcgaccacttcgcccccacccgcacgccagagggcgacctgcattacggccacggcgaagcgggtacccacgccccggggcagagccagcggcggatgctggaagtggagatcgacgtgctggataaaaacaaccgcctggcggcacgcaaccgcgcacgcttcgcagcaaaacagcagctggtgctgaatctggtttccagccccggctccggcaaaaccaccctgctcaccgaaaccctcacccggctgaaaggacgcgccgactgcgcggtgattgaaggcgatcagcaaacggtcaatgacgccgcccgcattcgcgccaccggcaccccggcgattcaggtcaataccgggaaaggctgccatctcgacgcccagatgatcgccgatgccgccccgcgcctgccgctggctgaccgcggcattctgtttatcgaaaacgtcggcaacctggtctgcccggccagctttgatctcggcgagcgccataaggtggcggtgctgtcggtcaccgaaggcgaagacaaaccgctgaagtatccgcatatgttcgccgccgccagcctgatgctgctcaacaaagtcgacctgctgccgtatctcaatttcgacgttgagcggtgcctggcctgcgcccgcgaggtcaatccgcatattgaaattattcttgtctccgccaccagcggcgaaggcatggagcagtggctcacctggctggagacgcagcgatgtgcataggcattccgggacaaatttgcgccatcgacggcgtgctggcgaaggtggaagtttgcggtattcagcgcgacgtcgacctgacgctggtcggcgccgttgatgagcagggccagccgcggctcggccagtgggtgctggtgcacgtcggcttcgccatgagcgtcattaatgaagccgaagcccgcgacaccctcgaggcgctgcaaaatatgtttgacgtggagccggacgtcggcgcgctgctgtacggcgaggagcgataatgcgttacgtagatgaataccgcgcccccgaacaggtgatgcagctggtggcccatcttcagcagcgtgctcgtctgctgccgcataccgccgcgcgaccgctgcgcatcatggaggtctgcggcggccatacccatgccatttttaaattcgggctcgaccagctgttgccggagaacatcgaatttattcatggtcccggctgcccggtgtgcgtcctgccgatggggcgcatcgacgcctgcattgagattgccagccgcccgggagtgatcttctgcaccttcggcgacgccatgcgcgtgccgggtaaaaacggctcgcttctgcaggcgaaagcccgcggcgccgatgtccgcatcgtttactcgccgatggacgctctgcggctggcgcagcaaaatccgcagcgcgaggtggtcttttttggtcttggtttcgaaaccaccatgcccgctaccgccctgaccctgcgtcaggcgcgagagcgcaacgtcgataacttctactttttctgccagcacatcaccctgctgccgaccctgcgcagcctgctggaccagccggagaacggaatcgacgcctttctcgccccgggccacgtcagtatggtgatcggcaccgaggcctacggctttatcgccagcgactatcaccgtcctttagtggtcgccggtttcgaaccgcttgatctactgcaaggcgcggtgatgctggttgagcagacaatagcgcagcgcagcgatgtggaaaatcagtaccgtcgcgtggtgccggatgagggcaacccgctggcgcaggcggcgatggccgacgtcttccgcctggatggcgacagcgaatggcgcggcctgggggtcatcagcgactccggcgtgcagcttacgccagcctatcagcgcttcgatgccgaggcgcattttcgcccggcgccgcagcgcgtgtgcgacgacccgcgcgcccgctgcggcgaggtgctgaccggccgctgtaaaccgcaccagtgcccgctcttcgccagcacctgcaatccgcaaagcgcctttggcgcgctaatggtctcctctgaaggggcctgcgccgcctggtatcaatatcgcagtcaggaaaatgaagtatgaaaagcgtccagttagcccacggtagcgggggacaggcaatgcagcagctgatcggcgacctgtttatgcaggccttcgccaacccctggctggcggagcaggaggaccaggcgcgcctcgatctggcggcgctcgccgcccagggggaccgcctcgccttctccaccgacagctacgtgattgacccgctgttctttcccggcggcaatatcggcaagcttgccgtctgcggtaccgccaacgatgtggcggtcagcggcgccatcccgcgctatctttcctgcggctttattctcgaagaggggctggagatggccaccctggaagcggtggtcgccagcatggccgacaccgcccgggcggcagggatcgccatcgtcaccggcgacactaaagtggtgccgcgcggcgcggcggataagctgtttattaacaccgccggcatcggcgccatcccggcggacgttcgctgggggacgcagcagattagcgccggtgatgtgctgctggtcagcggcacgctgggggatcatggcgccaccatccttaacctgcgcgagcagatggggctggacggcgcgctgtccagcgactgcgcggtgctgacgccgcttatccagaccctgcgcccgctgagcggagtgaaagccctgcgcgacgccacccgcggcggggttaacgcggtcgcccatgagttcgccgccgccagcggctgcggcatcgaactgcaggaggcaacgctgccggtcaacgacacggtgcgcggcgtctgcgagctgcttggtctggacgccctgaacttcgccaatgaaggcaagctggtgctcgccgtcgcccgcgacgaggcggaaaacgtgctggcgcatttgcggtctcacgcgttaggacgcgatgcggcgataatcggcgaagtggtcgtccgcccgggcgtacgttccgttgggctgtacggcgtgaagcggacgctcgatcttccccacgccgaaccgctgccgagaatttgttaacgacggcgtcgggtcccggatagcggctggcgccttttccgggctacaaaactgcgcgcacatgtagcccggctaagcgcagcgcgagccgggaaaaagccagcgtaattattttgcccaaaccagcgggcgcccatggatgggttaaagcggcaataaccgctttattaacatactattatttgtaccatcattttcttatgcgccgcgttgtcggcgcgttttggacgtaagcaatgtcgtatacaccgatgagcgatctcggccagcaggggctgttcgatatcacccggcttttattacagcagcccgatctggccgcgctaagcgaaaccctgacccgtctggtgcaacagtccgcgctggccgatgaggcggccatcatcctgtggaacgcgggtaatcaccgcgcggccaggtacgcctgcgatgaggccggccatccggtaagctacgaggatgaaaccgtcctggcccacggtccggtgcgtcgcttactctcccggccggatgccctgcattgcgatcatgaaacctttgccgatacctggccgcagcttatccgcagcggactgtatcgtccgttcggttactactcgctgctgccgctggcggcggacgggcggatctttggcggttgcgaattcctccgccgtgacaaccggccgtggagcgagaaagagttccagcggctgcataccttcgcgcagatcgtcgccgtcgtcaccgaacagattcagaaccgggtcagcaataacgtcgattacgatctgctgtgccacgagcgcgacaactttcgcatcctggtggcgatcaccaacgcggtgctctcgcgactggatatcgacgagctggtcagcgaggtggcgaaagagatccatcgctacttccggatcgacgccatcagcgtggtgctgcgcagcgaccgcaaggggaagctcaacatctattccacgcattatcttgacgccagccacccggttcacgaccagagcgaggtggatgaagccggcaccctcaccgagcgcgtgttcaaaagcaaagagatgctgctgcttaatctgcacgaacatgacactctcgcgccgtatgagaaaatgctcttcgagatgtggggcaataagatccagaccctgtgcctgctgccgctgatgtccggcaataccctgctcggggtgcttaagctggcgcagtgcgacgaacaggtcttcaccaccaccaatctcaagctgctgcggcagatcgccgagcgggtgtcgatcgctatcgataacgccctcgcctaccgcgaaattcagcgcctgaaagagcggctggtggatgagaatctcgccctcaccgagcagctcaataatgtcgagagcgaattcggggagattatcggccgcagcgaggcgatgaacaatgtgctcaagcaggtagagatggtggcgcacagcgacagcaccgtgctgatcctcggcgaaaccggcaccggcaaagagcttatcgcccgcgctatccacaacctcagcggacgcaacggtcggcggatggtgaagatgaactgcgccgcgatgcccgccgggctgctggagagcgatctgttcggccacgaacgcggcgcgttcaccggggccagcgcccagcgtatcggccgcttcgaactggcggacaaaagctccctgttcctcgatgaagtgggcgatatgccgctggaactgcagcccaaactgctgcgcgtcctccaggagcaggagttcgaacgtctggggagcaacaagctgattcagaccgacgttcgattgatcgccgccaccaaccgcgatctcaagcagatggttatcgacagggaattccgcagcgatctctactaccggctcaacgtgttcccgatccacctaccgccgctgcgcgaacgtcccgacgatatcccgctgctggtgaaggcgtttacctttaaaatcgcccgccgcatggggcgcaatatcgacagcattccggcggaaaccctgcgcactctgacgcgtatggagtggccgggcaacgtgcgcgagctggaaaacgttatcgaacgggcggtattgctcacccgcggcaacgtactgcagctctccctgccggagcgggatatcgtggaagccccgcggacgccggcggtcctgcctgaggaaggtgaggatgaatatcaactgatcgtccgggtgctgaaggagagcaacggcgtggtggccgggccgaaaggcgccgcccagcggctggggctcaagcgcaccacgctcctgtcacgcatgaagcggctgggtattaataaagacgaactggtgtaacctcgcgcgctccccctttccgcgccggtgagagggagcgctggcgcagcgcgctatttatcgctggtaaaaccgttgctggtcgccagttcggcaaaccacagcgcattgcgttttatctgtcgctcgccggtctccagatccagtcgccagaagccgtagcgccgtttgaaggcattgatccacgaccagttgtcgataaacgtccactggtgcacgccaaagcagttcgcgccgtcggctatcgcccgatgcagctgcaccagatgctcctccatcagctggatgcggaaagtatcgtctatcaccccgtccgccccgggctcgccctctgattgtcgatccatcgcgatgccgatttccgcgagataccacttaatattgccgtagttatcgcgaatattggcggcaatgtcatagatcgcctgcggcaggatctcgttgttatcacgataaggattaaagcggccctgcgggttcaccgcgttttcgaaatagtattccggggtgaaataatcgaggtcatattcgctctcacgcgcttttacccgccgcggcacataatagtttaccccaagaaaatcgatatccgcgctgaggatcaacgccgcgtcgtctttgctggtcgtcggcaggcagtcgtgggcggcaaggatctcgcacagcgctttggggaattcatgttttaccagcgggtcaaggaagctgcggttaaaaaacaggtcggcatacccggcggcttttttatccgcgtcgctgtcggtgagggtatagctcggggtcaggttgagcaccacgccgatctcgcccgccagcgccagttcacgataagccgttaccgctttggcgtgcgccagcataatgttaaacgccacctgcgccgccagccggccatctttcttacatggatagtggaagtcgtacaggtagcctccctcaaccggcacaatcggctcgttgaaggttatccagtatttaaccttatggccaaacaggctaaaggcggtgcgggcaaagcgggcaaacagctcggctacgtgcgccgattcaaagccgccgtactgtttctgcagcgcttccggcatatcaaagtggtagagattgatcatcggctcaatgccgttggcgatcatctcatccagataggcgtgataaaaacgcaccgcgtccgggtccggcgcgccggtttccaaatcagcgatcagtcgtgaccactgtatcgaggtacgaaatgagttgaagccggtctgtttcatcagcgccacgtcctgcggatactgatgataagtatcacacacggtctgcggccctacctgctgataaaatcgctccggctgttcggcaaaccaactgtcccagatggaacgatggcgcttattggtgaccccttccgtttgcgggccggacgccgccgccccccacaggaacccttgcggaaactgatactgctgcataacctctccttcgaaaaaaggctgcgcccgtctggcgcagcctgaacgtactactcagcgaccacttcgatcgatttaatgaacatatagccccagtcgccggcgaagcggccgaagtcaatctgattgctcccggctttaagcgtcaccggtatccgcagctgctggccctgctcatccgtctgcgggaaggccacggtctgcggagcgcccccgttgacgacaaatgagttctgcttaccgccccatttgccgttgaaggttacattgagcaggaactgaccgctccacggcgcctgcacctgccagctgaccttatccccctcgttggcaaatgggccgaggaagccgtcctcgccaactgtcagcgcgtctttatcactcttcatcaccgtcagccgcccctcagccacgccataaacttcgccgtgataacgacagaaatccgctggcgctttccccgccgcctcgcccaccgtcacggtcacggttttgctgcttttcaacagcccatcgtccgccgtgaacgtcagcgcataggtgcctggcgccgcaaaccaggcccgggtttgagcccgatcggcatggcagaaatgcacctggccatcgccggcgtgctgccagcccaccttaacctctcgcgacggcaggccatcgtcctgccagctggccgtaagctcgacgccctggtcctgcgtggtggttagggccggttccagcgtgacaaccggtggctgattctcctcgctatgctgcacgctaatcacattggaaggggccgaacgaccactctcgtttttcgccgtcacccggtagtaatacgtgtgcccgagctgaagctgacgataatcgtcgcggaacagaaccatggtttccggattccattcgttaacgccatcggagatatcccggcccaccaccgtccacggcccggtcggtgaggcggcgcgttcgacatcgtagctgcgtcccaccgcagcgcccatccagttgatcgcgaagggcgaggtggtctcgcgcagcaaaggcgcctccggcttcggcagcggcgccatcgtctgctgcccggccatctgcgccgcggcggtgcgcaccagatcgaccaccgcctgctcctggttcgcttcgccttctttggcaaaccccggcaggtggtagctgtagtgcccggtcgactccttatgccagtagaagccgccgtcgtgacgatggccgcggaagccccagataagcccgccggcggcttgcgccccgttgacgtcgctgtgaacaatcgactgcataatggcgttcagttgatccgccggcagcaggccaaactcgccgacgagatagactttttgtccgccgacggcgcgcagatcctgcgtcacctgcccgggatggttattatcggcattggtgtaatagtgattgctgacgatatccacattggggtcggtcaacgcaaacggattaattttcttataggtgccatccacaaccagctgatgaggggcccactttttaatccacgccgcggtctgatgcaggaaatcggcgttggtatcctccagctcgttaccggtttcccaggccatgatcgccttttcatcataataggcgcggccggtgacagtatttgtccgggtgataacctggcggatcacatccagataggctttgaaggtcttgctatcggtccgataaaagtcttccgctttttcatgatagaacgccgccagctgctcgcgcccgccccaccaccaccagtggtcgataaacggcaggatcagacgcaatccctgtttatccgcttcggcaatcatgttgtcatacacccgcatggctttctcattcagccgcggcatgccgtccgccgtttccggcgccagaatatgggtctcacgcccgcaggccttatcaaattcctgctgcaccgacagcacgtagacgcgctgggctttcgccccggtttgcaccatcgcctggatccagttttgctgctcctgggccgttggccatttaaagtattgcccccagccgcgcgggtctgccctgcaggggccgcgggcgtcgtcttcaatgcggtgcagctccggcgcgtggatcccggcgaaacgaaacaccttgtcgccgtccttgagggtggcgccgtcgcgagtgataaagtgcgtaaagtgcgagcgctcggcggccagcgccccgccggcccccagcgcggacagcagccccatcagcagcaggtttttcatcggcttcatcgttctctctccttagaaccagacctcggcctgtacgccgaagttaacggtgtcggtagagccactgcgggaatacccgccggcggtgatggtattggtatcccagttgtagttaccgtctaatgcatcggagacacctttatcccacttcgcgtaggtgacgaagaagcgcagctgcggacgcgcccagaaaccggagtcaaaggtcagcgttggcgcaacggtgactttggtcaggccgcctttgcctttgccgtttacccctttgtagtttttgtcatccaggtattcgtagcccagctcgtactgcatggcaaagttgcgggtgatctgatgataagggcggataccagcgacccacatcgagcgtccccagccattttcatcttctgtccaccagcggtagtttttatctttctgccagaaagcgaaggtcgagatctccaggtcgcccatcgaggccacgctatccagcaccactcgccaggactgggtgttttccaggttggcccagccccagccgtttttacccagcgagtcacccgccgccagccctttcccgtactgcaatgcgaggcgggagtatcctccggtcagaccatagaagccgtcaaagttataaataccggtcacgccatagcccttctcggcggaagttggatggttttcgttacggttcatgtggtggccgatcagctccagatcgaagcctgtccccgcgatctttttcagccacaggttgagagaatagtcatccgggtagccctgatctcccttatccaccgggtaggctttggtttcatcggtgggtgaaaaggcgtacaccccggcgtcgaagcgggcgaagccgagatccatgttgtcgaagccgcctccggtgccgttgtactgaatgtactcccagtcgaactgatggctggaggtgttggagctgctatagcgcttaccggcccagaaggtcatctccggcgcaaaatccagattgctcaactcggcgaacccttcacgaaactgtacgtcatggccatcgtcatcctgacagttccagtcggaggtgcatttcgactggtgagtgaggttggcctgcactttcgccaccacgccgctgtccgccgtcagcgtcacggtggggatcagttcgatcttggtgtcttcttcgttgcccagtcgccacttaccgtctggcatcaggccgacggagtccgcgcggttgccatcggagttcgccaggatcccggagcggatatagccatgcagcgcaaaatcatacttcggatcggcgcaggccgggctgctggcccctgccagcgagaggagagccagaggtattgagtgtttcagctttatcattatttttttcccacgttatgtttgttaacacgaaccgataacggaggggaaatttacggatcaaaaacggaaatgtacatccacttacggaaagcgctttccataattgcctatctggttcacaaaattagctctgcggcgaatatattcgtgagactgatcacataaaatgacaagaatgccgccgggcgccggcagtggagcggaaggaggagcagatgagcaggtgccgccgggggataagccgccgacggcgagaggatcagcgttcggtttccgcgagctgacgttcgtacactttgaagaaggggcgatagagcatccaggcgttaaacattgcgaacaggctcatgcacaaatttttccagctgccgttcgccgaccatgccgcccccagcggggaaggcatcgaccatggcagcatcgccaccgcgcgatcgagaatacccagctgagttaaataccatgcgatacaggcgtttatcaggggaacaaagagaaacggcagtaaaaaaaccgggttcatgatcaccggaaaaccaaacagtatcggctcgttgatattaaacagcgacggcagcaggccaatcttggccacgcttttcagctgccgcgagcggctacgcatcgccatcagcaccagcggcaaagtggagccaataccgccgatcagcaggtaaaaatcccagaacccctgcagataaatatgcggcagcgttggcgaacccgccgccagcgcctgctgattttcaaacagataggtcatccagaaggggttcatgatcccggtgatgatcagcgcgccgtggataccgataaaccagagtaagttacagataaataaagagataagtaccgccatcagcgtgtcggacgccagcaccagcggccgcaccgcttcgctgatcaactccggtacgatgcgtccggtggtctgcagcagtatggcattcatcacgcttatcgacagcatcaccaccagcagcgggatcagcagttgaaagccattgcgggtcatcagcggcacttcatcaggcaagcgaatacaccagccttttttgtagaaaaagcgaataatctcaatggaataggtgctggatatcagagcggtaaatatccccataccgccgagataaacattgctcaccgcagtctcgcgaaagccgataaacagcagaaaagccagacacccggttaaaccgcacagccgttccggcaggcggtactgtttggcgaggctggcgctggcgccgaaggcgacaatcagcgccaccagtccaatggtcagctgaaaggtcggcagcaggataggccgcagcagcaaatagacctggccgaaacgcgaggcgccgtcgatggaaacgggcggaaacaaaatgggaactaacaggctgccaacgatcacaaagggcatagccagcgcaaagctatcgcgcatcgccgtaatgtggttgttgcgcgtcagaacattcgccagcggcgccagccgctgctcgatgatgtccacggccacattcattaactgaatgttcatactcctacctttgcgaatggttgtctcgccgggatgatcgcccacaacaccggaaagtgaaagcctgccataggtgatcatggtcacaattaataaatccacaaacggaaagcgctttccgtaatgaatccattttgactatagtccgctcatccaacctcatcaggagcggtaattatgaaaaaaattatgttgtgttgttcagcaggcatgtccaccagcctgctgatgaaaaaaatgattgcggaagccgaacagcggggcctgccggtagagatcaacgcctatggcgtagcggagttcgccgaacaggtcggccattatcaggtggtgctgttggggccgcaggtgaaatacatgcagcaggatctgcaaaaacaggcggataaatacggtatccgcgtcgaacccatcaatatgatggactacggcatgcaaaaaggcgccgcggtccttgatttcgccctttcccttatcgaaaacaagaactaaggaaagatcatgagctctctgtacgctaaactgatcgacgtgatcgaacggcagatcacgcctatggccggcgcgatcggccagcaaaaatatgtcacctcgatccgcgatggctttatcactgccctgccctttatgatcgtcggctcgttcctgctggtgtttatcttcccgccgttttctccggatacgacgtgggggtttgcccgcgcctggctgcaattttcgctcgatcatcgcgatgcgctgatgctgccgttcaacttcagcatgggggtgatgaccctgtttatcgccgtcggggatcgccgccagcctcgccaaacaccatcatctggactcgctgaccgccgggatgttgtcgctgatgtcgtttctgctggtagccgcgccgctgaaagatggccagatctctactgcctacttctccggtcaggggatctttaccgccattctggtggccatctattccaccgagctgtacgccttcctcaaacggcataacatcaccattcgcctgccgccggaagtgcctgccggggtggcgcgctcgtttgaaatcctgatcccggtgctggcgatcattctgacgctgcatccgctgaacctgtttatcgaagcccagctggggatgatcattccggaagcgatcatgtcgctggtgaagccgctggtcgcggcttccgatacgctgccggcgatcctcctgtcggtgctggtctgtcaggtgctgtggttcgccgggatccacggcgcgctgatcgtcaccgggatcatgaacccgttctggatggccaacctgtcggtcaatcaggcggccatggccgctggcaccgctatcccgcacatctatgtccagggcttctgggatcactatctgctgatcggcggcgtcggctccaccctgccgctggcgctgatgctgctgcgcagcaaggccgtgcatctgcggacgatcggccggatgggggtcgtgccgggcgtatttaacatcaacgaaccgattctgttcggcgcgccgatcatcatgaacccgctgtttttcctgccgttcgtgctggtgccgatggtcaacgcgaccctggcgtacttcgcgctgaagctggacctggtcagccgcgtagtgtcgatgacgccgtggacaacgccggcgcctatcggcgcctcgtgggcggcgaactggagctttagcccggtgatcctgtgcctcatttgtatggctaccgccatggtgatgtacctgccatttctcaaagcttacgaaaaacagctgctggcccaggagcgtgaaaacgccgtcggccaggctgacaacgcggcgcaaaccgcttaacgctaacgattcagaggataatcatggaattagaagaacaggtgatggggatcatcatcaatgccggccagtcacgtagcctgtgctacgaagcgctgcacgccgctaaagcgggtgatttcgccaccgccgacgccaaaatgcaggaagcggcgcactattcccgcgaagctcaccttgtacagacccagcttatcgaagctgacgaaggcgagggaaaaaccaaaatgacgctggtaatggtccatgctcaggatcacctgatgacatccattctggcgaaagagctaattgccgaactgattgcgatttaccgcgcgcagccgcttcacgcctagcgccttgcccggccagacgcgctggccgggcctgattccccgaggtcactatgttacatcttggaatagatattggcggcaccaaaatggaagccgtactgctggacccggcgggcgaatgcgtccagcgcctgcgccggccgacccacaaagagagctatgacgcctttatgcgtcagctgctgaccctgattgccgatattcgcgcggtcagcccgcagccgttcaccctggggatcggcctgcccggggctatcgatccgcaaagcggacgcattaaaaactgcaactgcctggtgctcaacggtcacgatctgcgccgggatatcatgcagcagcttggccagccggtgtggatggcaaacgatgccgactgcttcaccctttcggaggcggtggatggcgccggcgccggagctaccaccgtcttcggggtgattatcggtaccggctgcggcggcgggatcgccgttcatcaacagctgctcagcggccccaacgctatcgccggggagtgggggcataatccgctgccgggctatactcctgagcgcgatggcccgccgcagccctgctactgcggcaaaacgaactgcatcgaaagctttctctccggtaccggcttcgcccgccgctatggggaacaagcccgtgcggaagccattgtcgccgcggcgcaaaacggcgatccgcgcgcgctggcccactggcgacactttatcgatgcctttgcccgtagcctggcgtcggtgatcaatattctcgacccgcaggtgattgtgctgggcggcggtctgtccaacgtcagccagatctatcgcgatctgcctgccgccatcgtgccgtggatcttctccgacacctgccgcacgcagatcaaaccggcccgtttcggcgacgccagcggcgtgcgcggcgcggcttggctgccccggcttcccggcgccgcgcaagggccgcggtagacacttttttcagcaggtatgttaagctaggcgaaaatgttcagacagaaaaagccatgccaacgattgatgatgtttcaagattagcgaatgtctcaagagcgacggtatcccgcgtgctgaccggcacccggggcgtgcgcgaagagagccgggaagctgtgctgcgggccgttgaagaactcaactatcgcccgagctttgccgcgcaaaacctcgccagtcagacatccagccacgttggtctggtgatttccgcgcaggacgaaagccacggcgcacgtctgctgccgctgctctctcaggcgctgaaagtgctgaataaaagcctgctggtccagtacgtcagcgacccggtagagcaggcggcggtaatcgacgatctgcagcgccagtgcgtggcggtggtggtgctgggcgccgttgccgccgacgcgccgcgcaacgttatcgcctttgaccgcttcggcgtcgccgggagcaacagccagggctatgacttcgcctttgccaccgaaagcgcctgccgctatgtgattggcaagggacaccgcaacatcgccctgctggtggacagcgatagcgacgatgccagccgtcagatgctggaaggctaccgcaacgtcctgcagaactactccattccttttaaccgccagctggtgctgacggccaacgatgacgtcgagcaggcgctgctgaccttaattaacagcttcagtaaatactcagtcattatcgttaaacgcgaccgctacgcggctgaggcgatgcgtctgctgcgcgaattcaccatcgccgtcccgcaggaggtctccctgctgagccttgaggattccccgctcgcctcgctgctctacccgccgctgacctgcatctcctggccactggaggcgctgctggataactgtattcagcgtattcgcagcctgattgacgaccggccaaccttcaccgccgagggccgctcgctggctggccgcctgatcccgcgccagtcggtcgccgatatctcttgatcttcgcccggttggcgccgggccagacttacctccccttttcgcgctttcgtttccgggctcattattacccacgcatgcaaataagaattattttcatttataaatagcttgtgctatataacatagcaatggctataaacgctgggaaattaaccacaccattgcgagggatcctatgctacacctgacaccgctgaaatcattgctgctggccagcgcgctggctctgctggccgcgacgccggcctcggcgcaggagaaattcagggttatcaccaccttcacggttatcgccgatatggcgcagaacgtggccggcgacgccgccgacgtgagctccattactaaaccgggcgcggagatccatgattaccagcccacgcccggcgatatcaaacgcgcgcagggggcgcagctgatcctcagcaatgggcttaatctcgaacggtggtttgcccgtttttatcagcacttaaaaggcgttccggaggtggtggtcagcgaggggatccagccgatgggcatcagcgcgggcccctatagcgggaagcccaatccccatgcctggatgtcggcagataacgccctgatctatgtcgataacattcgcgatgcgctggtgaagtacgatccgcctcacgccgacacctatcgccgtaacgccgaggcctacaaagagaagatccgtcagacgatggcgccgctgcaggccagactggcgcagctgccggcggataagcgctggctggtcaccagcgagggagccttctcctatctggcccgcgactatggcctgcgcgaactgtatctgtggccgatcaatgccgaccagcagggcaccccgcaacaggtgcgcaaggttatcgacaccatgaagaaagaacgcatcccgaccatcttcagcgaaagcaccatctccgataaaccggcgcgtcaggtggcgcgggaagccggggcccactacggcggcgtgctgtatgtcgattcgctgagcgccgccgacggcccggtgccgacctggctcgacctgctgcgcgtcaccaccgaaaccatcgtcaacggtatccaggacgggatgaggaagcagccatgaatgcagcgcaagcgggactgtatgtcgaccagctcaccgtcacctggcgtaacggccacactgccctgcgcgacgcctcgttcagcgtgccgcgcggctccattgccgcgttggtgggggttaacggctcgggtaaatccacgctgtttaaagcgctgatgggctttgtccgcgttggtcacggcgagatcgccatactcggccagccggtcaaccgcgcgctgcgccagaacctggtcgcctatgtcccgcagtcggaagagatggactggtccttcccggtgctggtggaggatgtggtgatgatgggccgctacggccatatgggctggctgcggcgggcaaagccgcgcgatcgcgagattgtcgatgccgcgctggcccgcgtgggcatgagcgagttccgccatcggcagattggcgagctctctggcgggcagaaaaagcgcgtctttcttgcccgcgccatcgctcagcagggtcaggtgatcctgctggatgaacctttcaccggcgtcgatgtgcagaccgaagcgcggatcatcagcctgctgcgcgagctccgcgatgagggctgtaccatgctggtctccacccacaacctcgggtcagtgagtgaattttgtgattatacggtgatggtgaaaggcaccgtgctggccagcggcccgacagaaaccaccttcactgccgagaatctggagcgggctttcagcggcgtgctgcgccacgtcgcgctcacaggcggggaagcgcaggttatcaccgatgacgagcggccgtttatcagccggcgcgcggcgggaggcccacgatgagctggctgctggagccgtttggctatcactatatgctcaatgcgatgtgggtgtcggcgctggtgggcggcgtctgcgcctttctctcctgctacctgatgctcaaaggctggtcgctgattggcgacgccctctcccactcgattgtacccggcgtcgccggggcctatatgctcggcctgcccttcgcgctcggcgcatttctctccggcagtctggcggcaggcagcatgctgtttttgcaacagcgctcgcggctaaaagaggatgctattatcgggctgatcttctcctccttcttcgggatcgggctgtttatggtgtcgctgaatccgacgtcggtgaatatccagaccatcatcctcggcaatattctggccatcgccccggaggatattatccagctggcggcgatcggctttatctcaatggcgattctgctgctgaaatggaaagacctgatggtgaccttctttgatgaacaccatgcccgctcgattggcctgaacacccgcggcctgaagctgctgttctttaccctgctggccgcctgcaccgtggcggcgctgcagaccatcggcgcctttctggtcatctgcgtggtggtcactcccggggctaccgcgtggttgttaaccgatcgcttcccgcgcctgctggctatcgccgtgtctatcggcagcctgaccagtttcttcggcgcctggctcagctactatctcgacggcgccaccggcggcattatcgtggtcgcgcaaacgctgctgttcctcatcacctttatcttcgcgccgaagcacggcctgctggccagccgccgccgcgccagggaggccgcatgctgaacctgttcctggccccgttccagtttccttttatggtcaatgcgatagcgatatcgatcgtcgtcgccattccctgcgcgctgctgtcggtgtttctggtgctcaaaggctgggcgctgatgggcgacgccatgagccacgcggtctttccgggcgtggtgctggcctacattatcggcatccccttcgccatcggcgcgtttatcgccggtctgctgtgcgccgtgacgaccggttttctcgacgataacagccgactcaagcgcgataccatcatggggattgtcttctccggcatgtttggcgccggactggtgctgtacgtagcgatccagtccgatgttcatctcgaccatatcctgttcggcgatatgctgggaatatccctccgcgatattgggcaaacgacggcgatcgcactggtgattgcgttgattatcggtctcaaatggcgggattttttgctgcacgccttcgatccaacgcaggctaaagccagcggcctgcgcggcggactgctgcactacggcctgctgtgcatgatcgccctgaccatcgtcgcgacgctgcagtcggtggggattattctgtcgatttcgctgctgattgcccccggggcgatcgcgcttctgctggtgagacgctttatccacgccctgctgctggcggtagcggtggccatcggctgctcggcgggaggggtgtggctggcgttctatctcgacagcgcgccagcgccgactatcgtagtgctgtttaccgcgctgtttgtggtcgcctttgtcgcaagcacgatccgcgatagtcagaaacagaaaacttcagcaattatccccggtggcggctaacgccttgccggggctacaagagcacgacttgtcgcccggctgcgcagcgctgaccagggaaagcagctactttttcggtcgatatttttccggcagcggcggcaccgggcgcctgtcgtccagcagatggcgaatagtgaggatcgggtggcgccagagcatccgcggcccggcccagcgcataatctgcttcatctcctcgcgcttcgccggctggtagcagtgcaccggacactgcttgcaggccggtttattctcgccaaacacgcacttatcaaggcgcttgtcagcgtaggcgttcagcgcctgatagtgcgcattatcggcctgcgcctcgggacagcgccgctggtagagggcaatcatccgctgaatcgtcattttttcccgttcgatacgcttccccatctccccgcctttcgtcttttttaagatgcatttatcatacaccttaatatccatacccgaccagactcactgcttcagatgctgaatcaactgcagggctgccccggacagaaccccgaaatggctgtaggcatagaaatcccggataaaaacgctgccctcgagctcaaacgggcgcagcaggccaagcgcttcttcgtgtcggtaaaccggggccggcatcgacgttaacagatcgctctcgcacagaaaggccttaatggccgaggatgaggcgcactcaataaccggctgcggacagggtagctgccgggcgcgaaagatatccgccaggatgttcattggcgtactagacggcggcggcatgatccacggatagtccagcatcgcctccagggtgacgtccgccgcctgatgcagcgggtggtgctgcctggcgacgatgcagatccggtcctgccagttaattttgccccgcaccacgattttctcatcatgcggtaagggaccgcagagggcgatatcgatgtcgtgcatcagcaacagcttatacagctcggagtcaatgcggtcgacgatccgcagatggatctggggatggtgctgatggaaagccgccagcttatcgatgaaatggctggtcagcagactggaaacgcagccaatccgcagaatgcctttcccggcgccacggatgagctcaatttcctcgcgcgccttttgttcggtattcagcatcgtcagcgcgtagggtaaaaaggcgctgccatattcgctcaacgccatgccgtgcttatgtcgttcgaataaggatgcgctcaggtccgcttccaggctcaatagcagtcggctcagtcccgactgggtgatccccattttctctgcggccagggtcatattgccttcgcgggcgacggtaataaatgcctgaatctgcttaaatttcattggcatgatatttactcattgaataaacggtttttgcatttcccctgcgcccttttttagcgaataaatatcgctatcaatacgctcaaaaatcaccggaacgcatacttcaaaaggatttatttatctcaccaccccggcaaaacacatttctgatccgaagataatttataatgagaatatatcaccatgacacagaacaatattctattaatttcaggcgctatattaccggtcatcattaccgtcatcatcggctatattagcggtaaacgaaaagactttaactggcagcaggcaggagacatcaataaaattgtgatgctctacgcattgccgctaagtattttcagcaatatggtgatgacgccgcgacacatcgtcatgaccatgggcccggtcgccgtggctatcatcctggcgctgattctcagcttcgtcattcccttactggtcgcccgctatctgtttcgacgcgacctcgccctcagtacgctgcaggcgctggccatcggctcgccggcagtcccgtttatcggcacctcagtgctggcctttttatttggcaccgtcagcgcgtcgctgatcaccgtgtccagcatcacgcaaaacgtcttccagctgccgctggtgatgatactgatgtcggtcgccaccggcgataagagccagcatatttcctttggcgcacgggtggtgaacgccattaaacaacccgtggtctggtcgccggtgatcgccctgatcatcgtgctggcggatatccatattccgcagactatctcgatgtcgctgggtctgctgggcaaagcctctggcgggctggcgctgtttgccgccgggatcgtgctctatacgcgcagcattgttatcaccaccgctaccattatcaccgttatcgcccgcaatattctggtccccggcgcctgctatctcattttattaaaaatgggcttcagcatggagcaaataaaggaagtcgtattgacgatggctatcccggtaggctccatcgcgataattattgctatgcagtataaaaccggcgagcaggaaatggcctcgacgatggcgctgagtattattgcctccatcattacgatgggcggatttattttcttaaccttttaattaccgcgattacaccgcgtgaatacggagagaatatggcctctatcacattatcggctgctgaacttttactgcatcggctacaggcgctggacgtggcgtatatttttatcaactcgggcaccgattatcctccagtcattgaagcctgggcaaaggcccgggcgaccgggcaaaaggtaccggagttagtgatctgcccgcatgaaaacgccgccatcggcatggcccatggctattacctcggcaccggcaaggtgcaggcggtgatggttcacaccaacgtcgggctagccaacgccgcctgcggcgtcatcaatctggcgaacagcaatattccggtgctgatttttggcggccgcacgccgataagcgaacattcccacttcggctgccgtaatacgccgattggctacggccaggagatgcgcgaccaggcggcgctgatccgcgaatccgtgaagtgggattttgaactgcggctggccgatcagatcggcgagcatgttgaccgggcctgggcgatcgccagctccctgccgaaagggccggtctacctgagcttaccgcgtgagccactgtgcgaaacctttgccgtcgatgaggccgcgctgcaggctggcccttcgcagcagccggtccgctatgcgccagtccgggaagatatcgcccgcgcagccgaggcaatcgcctgcgccagacacccggtcatcttcgcccagcgcggcgcccgaacggcggaaggctttgcgcgcctcgatagtctggtgcgcgaatgggcgatccctctggtggaatactggggcaccgaggttaccctgagcgccgataatcccctgctcgccggggctgatcccagcgtctggctcgctgacgccgatgtgattctggtggtcgactcgcaggcaccatggatgatcgccgagggcgactgtcgccaggactgcaccgtgatccagatggggcccgatccgctcttctcccgctacccggtgcgcggctatcgcgcggacatcaacctggcgggcgagaccgatgaagtcttcagcctgctggaagaggcgctgcgcccgctgcaggccgcccgccagcagcatgtggcggagcgggcggcatatacgcagagccgcatccagcaacagaaaaaccagcgcgacgcgcttctccatgccagccagagcggggccattaccaaaccctggctcagctactgcctcggccatctggctaatcaacaccgcggccggatcgtttctgaactgaccacgctgccgcagtttgccggactgacccatgccgagagctattaccaggaagcgctggccggcggcctgggcgaagccctgcccatcgcgctggggctgcagcttgcgcgccgggaagagctgattattgccgccgtcggcgacgggtcgtaccttttcgccaaccctgcggtctgccaccatattgcggaggtaatgaagcttcctgtcctcgtcgtggtcggaaataacggcggatggggcgccgtcgcgggcggcaccaaagcgctctacccggacggctacgcggcccgcgcggaaaccattccggccaccgcctttaccacctcgccggatttcgccgcgatcgccgcctccagccgcgcggcggccctgtcggtttcccgggccgaagatctccccggcgtgctggaagaagcggtatccctcatacgcacccgccgacaaagcgtgctggttgacgtgcagttagcccgctaacggtttatcctccgggcgcttgtcgtccggagggggttgtcaccccttctggtcacctttatccacatggcccagcggcttctccgggaagcagacatcgcgcacccggcgtttcagctcggccgcatccggaaaaccgccatcctgcttgcgctcccagatctgctgaccgtcgacatcgatcgtgaagatcccgccggtccccggcaccagcgtcaccgaggcgatgtcggtgctgaaggtatgtaacagctcctgcgccatccagctggcgcgcagcatccagttgcactgggaacagtaggtgatggtgatggccgcttttgagttcatcgtcgtctcgctaagtctgaaagggcaaattgtaaacaaagtgcagtttaaatgaagaacacatgattattttgttgcaaacgataatacctatcattaccattcgcaatcaacaaatggagtaagaccctatccgcaacggaaaagacggagcaacctgcaactctggaagtaacgcgtgagccgatactaataacgatcaaggcgtggcgactatgtacaaatcgactccgtcagcagcatggtgtaaaaaaggcctgctggtgacctctttgtttgcagcaatttatcagacttctgccatcgcagcagatacttccgccgttagcggcgaggcggtggatgacacttcggaacaaatgaccgtcaccgcccccgcgccggtgcagaaagccggtagcgaacacagcatcagcgcccgggagctggagaataaaggcgctaacgatttcagctcaatcatgcgctatgagccgctcattagcgccgccggggccagcggcggctccggcaacggcaaaagcggcttcgaccgcggaggttacaccggctacaacattcgcggtatggagagcaaccgcgtaggcatcgacgtggacggtatcgcgcaacccaacgccaccggccgcggctacgtcggccgcgccgggctcaacaccttcggcatcggccgcgattatatcgacccgtatatgtacggcagcgtggatatccagtccggcgccacctcgacggaaacggccaacagcgctatcggggggaatgtctccttccgcccgaaatcagcggatgattacctgcgcccgggcaagaccagcgccttcggctaccgcagcggttacgactctgcagatcgcagctggcacaacggggtgaccgtcgccggtggcgatgagttcctgcgcgggattttggtctatagccgccgtgacggccaggaaaccgaaaacaacagcggcaccgtcgacgcctacccggcgaactggcactccgatgcttttctggcctccgggatctggcagcctaacgatgagcacaagctgaccagcaccttcgactattaccataaaaccaaccacacccactacgatacctgggactccagcggcaacagcaccatcggcaccgccaaccagaccagccagacccggcgctggggcctgagcctgaaggatgactggacgccgatgaacgactacctcgacagcgtctccacaaaaatctactaccagcataccgaagcccatgactggacttatatgccggacagcgtcacccgcagaatgcagacggtgaactctaactacgataccgacacctggggcctgcagactgcgctggcgaaaaccctgggccgccacgatctaagcgccggtttcaacgccagcaccagcaaaacccagcggccgttcagccagtcgccgatccccagcgtttacagcgagatcatgcagccggaggcagacagccgcagctacaccctcggcggctttgtccaggataagatcaacttcgaccttgatagccacaacttcgccattattcccggcgtgcgcgtggtgcatcaatcgactaagccggaaaatctgtccgaccttgccgccaacagcagcgtactgagcgaatcgtcggtggcgaatctgtacggcaaaaacagcgatacccaggttctgccgtcgttgaccttccagtacgacctcaccccgcgcctgatgacctacctgcagtaccagcgcggggcgcagttccccaacgccagccagctgtatggctcctggaacctcggctccagctacgccggcagccagcagtatgccctgatcggcaataccgatctgaagacggaaaccagcgataatctcgagtgggggctgaaaggggaagttaccgaaggcatcaccctgcgcacggcgctgttctacaacagctataagaactttatcgcctatacccgctatacccgcgccaacaatccgggccagttcacgaatgtgccgtcgaacatctacaccatttatcaggcggaaaaccgcgataaagcctatatctacggcagtgagattagcactaaatttaactttggcacctggtttgagcaggtggacggcctgagcgccaccctcgccctcggctatagcgaagggaaatcgaaatccagctacagcggcgataaatacgtcgacctggacagcgtggcgccgatgaaagccatcgtcggcgtggcgtgggacgatccggcgaaacgctacggcaccgccctgacggcgacctttgtcaaagggaaacaggcgaccgccaccaaccgcgaaagctacagcaacagcggatccgccatcaccgatgccagcagcgactatatgcgcgtgccgggctacggcatgctggactggaccgcgtactggcaggtggcgaaaaacgtgcgcctcaatggcggggtctacaacctcaccgatcgtaaatactgggattacctgagcagccgcaatatcgagaccggcaccaaccaggacgccaacgataaagcgctggcggtgatgccgggccgcacctggcagctgggcgtcaacgtcgacttctgattgcccgaataataacgcacctgcccccggcccgccggccggggatattcatcgtcgagaaggatatgattatgccaaatgcacaccctgacctgtggcagcgctaccaggccaccaaagcggccagtaccgcgaaatatgcccgcgatatcgccgcggaaatggggatcagcgaagccgagctgaccgccgcccgcctcggccatgatgccgtgcgcctgagcgatgacgcccgggcgctgattgccgccctggagcgcgtcggcgaaaccaaatgcatctgccgcaacgagtatgccgtgcatgagcaggtgggccagttcacgcaccagcacctcagcggccacgccgggctggtgctgaacccgcgtgcgctcgacctgcgtctgttcctcagccagtgggccagcgccttccatctgaacgataatggccgtcagagcatccagtttttcgaccaccacggcgacgccctgctgaaagtctatgcgaccacccagaccgacatggcggcctgggacaccctgatcgcggaatatcgggtggcggcgccggcaccgctgaccctgcgcccgctggagccggtgaaatatgccgataccgccgacggcgccgccctggagaacgactggcgcgcgatgaccgacgttcaccagttcttcggtctgctgcgtaaatatcagctttcccgccagcaggccttccgtctggtgagcgacgacctcgcctgccgcgtggatcgccatgcgctgccgtcgctgctggagacggtgcgccaggagggtaatgaaatcatgattttcgtcggcaatcgcggctgcgtgcagatctttaccggcgccctggaaaagctggcccccatgcgcggctggctgaatatcttcaatactacttttaccctgcatctgcgcgaagagagcgtcgatgaagtgtgggtgacccgcaagccgacttcggacggacacgtcaccagcgtcgaactgttcgctaaagacggcacccaaattgcccagctctacggccagcgcagcgaggggcaccccgagcagacgcaatggcgccagcaggtagaccgcctgacccgtgaagggcagcccgcatgatgcgctggttactgctcttcatcgctttcccgctgctgagtcacgccgccgttgagcggctcgtcaccctcggcggagatgtcactgagatcgtttatgcccttcacgcggaggagagcctggtggcgcgggacagcaccagcagctggcccccggcggcgcaaaagttgccggacgtcggctacctgcgacagctgaacgccgaggggatcctcgcgttacgcccgcagctggtgttagcgagcgcccaggcgcagccctcgctggtcttacacaaagtgcaggcgagcggggtgaaggtggttaacgtgccgggcggcgaaagtctgtccgcgatcgataacaaagtggctgtcattgccgaagcgttaggcaaaacggcggcaggcgacgcgctgcgccagcagcttcagcagcagatcgccgccattcccacgcagccggttgctaagcgggtgctgtttattctcagccacggcggaatgaataccctggtggccggacagcataccgcggccgatggcgccattcgcgccgccggattgcagaacgcgatgcagggcttcgaccactatcgcgccatgtcgcaggaaggggtcgccgccagccaggcggatctggtggtgatctccgccgatggtctcaaagggatgggcggcgaagccgggctgtggaaactgcccggcctggcgcagaccccggcggggcgtcataaacagctgctgacgatcgacgatatggccctgctgggcttcgggccgcgcacaccgcaggcgataatcgcgctgcgaaacaaagcggagcagttgccctgatgcgccctgccctcgctcgccgtttgctgctgatgacgctgctgctggtctccctgacgttgtttgccaccaccctcggcgccatgcgcttgccgctggtcaacctgctgccttccggggatgacatgctgcgccatatctggctgaccatccgtctgccgcgggtgctgctggccctgctggtgggcgcggcgctggccctctccggctgcgtgatgcaggggctgtttcgcaacccgcttgccgacccgggcctgctgggcatcagcagcggcgccgcgctggcggtggccagctggctggtgctcccgttctccgctgcggggctgatcgctctgtatatgccgatgctggcggcgtttattggcagcctggcggtgatggtggtgattttcatcctcagtcgggcggaggagggttcgctgtcgcgcctgctgctggtggggatcgccatcaacgcgctgtgcggcgcgctggtcggcgtcctgtcctggctgagcaatgacgcccagctgcgccagctgtcgctgtggggaatgggcagtctgggccaggccgaatggccgacgctgctggtggccgcgaccttgattatccctgcggcgctggcggtgtggtggatggcgtcccgcctcaatctgctgcagcttggcgatgaagaggcgcactatcttggggtcaacgtgcaggcgctgcagcgctggctgctgctgtgcagcgcggtgctggtggccgtcgcggtggccatcagcggagtcatcggctttatcggcctggtggtgccgcacctgatgcgcctgtggctgggaccggaccatcgcggactgatccccggctcgctgctggccggcgcgatcctgcttctgctggccgacaccctggcccgcaccgtggcggcgccggcggagataccggtcggtctgctcaccagcctgctgggcgccccctggtttctgtggctggtctttcgtcgggagaactccagacatggttaatgaatactgcgcccaggggctgtcacttcaccttggtaaacgacagattatcgacaacgtctccgtcgcgctgcgcggcggcgagatgacggcgcttatcgggccgaacggcgccgggaaatccactctgctgcgcctgttgaccggctatctgactccggacagcggcacccgccatcttgcaggcaagccgttggaggcctggtcccccgaggcgctgtcgcgccggcgggcggtcatgctgcagcgaacagccctgcaggccgactggacggtggaaacggtcattgccatgggacgctcaccgtggggcgcgacggcggatccggcggtgctggcggcggtgatggccgtcaccggctgcgatggccttgccggtcgccgctatcccggcctctccggcggcgagcagcagcgggtacagctggcccgctgtctggcgcagctatggcgcgacggcgcgccgcagggctggctgtttctcgatgagcccacctcggcgctggacctttactatcagcagcacctgctgcgtttgctcaaacggctcaccgccggcgggcaactgcacgtctgcgtggtgctgcatgaccttaacctcgccgccctgtgggccgaccgcatcctgctgctccaccagggacatctggtcgcccagggcacgccgcaggaggtgatccagcagccggttatccatcgctggtacggggcggatgtccgcctcgtccagcacccggacaacgcggtcccccaggtttgtctggcgccataatccccgcgcggcgcaactggaatccggatcgcgccgcgcttacgctttctggcaataattgcctgcattatattattgagggtcatttatatttaaaatctataccaatggcgtaataacccaatgaaatatttacgacagctatttttaaatataaaccatcattacagagaagatatttcccgtattaatccaaaaacgacacattgattatttactgcgcttaatcaactcgatacactgttttcttactaatgataatagagggaagaagaagcatggctattccaggtaatatgtggatatacgacgacggtggggcactaatcaaaggtggttgtgatgttgcagacagggagttcagcatcgaatttaaagggtttcatcacaatctctccattcccactgatcatgccactggcaagcctaccggcactcgtcagcactcaccaatgatcatcgttaaagaattcgactattccagtccatacctctacaaagcagtagctactggtcagaacctgaaatctgctgaaatcaaatggtataaaatcagcgatgctggtcaagaagtggaatacttcaatatgctacttgaaggcgtccgaatcgtatcaatatctcctacaatggcttccccagaagacaagaacaacaaccatcttgaatctgtcgaacttagatatgagaagatcacctggaaacattgtgacggaaatataattttcaccgatgcctggaatgaaagacaaacagcataatagatgagcaaatggatacgacagaagaactaaatggaacctatttctatcacggacaatccaatctttcggctggtgaactttttgatgtcatttttcttgaacaattttgtgacgaacttggcattggtattgaatctggtgccgctatcctcgccgggcaaccttggctaaaaaccagaacaaagccaggagaggcaataaaaggaacaagtgttgtttctaaatatggaaggatgcttctgagaaatgcaaaaactccatttggtattagggttcctacacccgttggtgtaagaatgagaaaaacgaatagtcttgctgctgttatcgcccgttatgttccgtggttaggttggataggacttgtaaactcaatttatcaagtttcaagaaaaactcaggaaaaatacaacctaatagctcgccccaaagaccgtatacaatggacatccttttaatgaaaagcattcaagatcaggttttagacttgtttaaagatgagatctcaacccgtttagataaaaattggaaagaaatcccattggaacttgattatgacttatttgatgctcccggcgacgatctgcatgacgctttaaataaatttgaacaaaaatttaatgttgatctttccagtgttaaatggtcgtgttatttcccttgggagaatactccaatgctaactcggtggtttaaagtaaaacgagaagatgtagaaaaaacgcgtaaacctttaactatcaaaatgtttgccgaatcagcaaaagcaggtaaatggctttacgactagcaaccacaagccgttgtcgtaacgaggtctacggccagaaggcagaacaacatcgacggcgaacgtaatgtatgaagacgatcgcgtggcggcggttcaattactgtgacggtaccccgccccctctgcaactggaatccggatcgcgccgcgtgctttcgtcggtttccctcacctgcccatctccgttattatgtctcatccatgtgataacgacgacaactacaaaatcgcagccatttcaaatcagggatctggataacaccccatgagcacaattgacaatctcgacgcccacacgccgatgatgcagcagtatctcaagctaaaggcgcaacatcctgacattctgctgttttaccggatgggggatttttacgagctattttatgacgatgcgaaacgcgcctcgcagctgctcgatatctcgctgaccaagcgcggcgcctccgcgggcgaaccgatacccatggccggcatcccccaccacgccgtagagaactacctcgccaaactggtcaatcagggcgagtcggtggccatttgcgagcagattggcgacccggccaccaccaaggggccggtcgagcgtaaagtggtgcgtatcgtcaccccgggcaccattagcgatgaagcgctgctgcaggagcgccaggacaacctgctggccgccatctggcaggacagcaaaggcttcggctacgcgacgctggatatcagctccgggcgctttcgtctgagcgaaccggccgaccgcgaaaccatggcggcagagctgcaacgcaccaacccggcggaactgctgtatgcggaagattttgccgaatcgtcgctgatcgagggccgccgcggtctgcgccgtcgcccgctgtgggaatttgaaatcgacaccgcgcgccagcagctaaacctgcagttcggcacccgcgatctggtcggcttcggcgtcgaaaacgccccgcgcggcctgtgcgccgccggctgcctgctgcagtatgtcaaagacacccagcgtacctcgctgccgcacatccgctccatcaccatggaacgccagcaggacagcatcattatggatgccgccacccgccgtaacctcgagatcacccagaatctggccggcggcaccgacaacaccctggcctcggtactcgactgtacggtgacgccgatgggtagccggatgctcaagcgctggctgcatatgccggtccgcgataccgccgtgctggtggagcgccagcagaccatcggcgcgctgcaggagcgctataccgagctgcagccggtgctgcgccaggtcggcgatctggagcgtattctggcgcgtctggcgctgcgtaccgcgcggccgcgcgatcttgcccgcatgcgtcatgccctgcagcaactgcctctgctgcgtgagctgctggccgacgttgacagtcagccggtgcaaaaattgcgcgagaaaatgggcgagttcaccgaactgcgcgaactgctggagcgtgcggtgatcgacgccccgccggtgttggtccgcgacggcggggtcatcgccccgggctatagcgaagagctggacgagtggcgggcgctggccgatggcgccaccgattatctcgataagctggagatccgcgagcgcgagcggctgggcctcgataccctgaaagtcggctacaacgccgtccacggctactacatccagatcagccgcggccagagccacctcgcgccgatccactacgtgcgccgccagacgctgaaaaacgccgaacgctatattattcctgagctgaaggaatacgaagataaggtgctgacctccaagggcaaagcgctggcgctggaaaaacagctttatgacgaactgttcgacctgctgctgccgcatctcgccgatctgcaaaccagcgccagcgcgctggccgagctggacgtgctggtcaacctggcggaacgcgcggaaaccctgaactactgctgcccgacctttagcgataagccaggcattcgcattagcgaaggccgccatccggtggtcgagcaggtgctgaaagagccgtttatcgctaacccgctgcagctggcgccgcagcggcggatgctgatcattaccgggccgaacatgggcggtaaaagtacctatatgcgccagaccgcgctaattgcgctactggcctatatcggcagctacgtcccggcgcagaaggtggagatcgggcccatcgatcgcatcttcacccgcgtcggcgcggcggatgacctggccagcggccgctcgacctttatggtggagatgactgaaaccgccaatatcctgcacaatgccaccgagcatagcctggtgctgatggatgagattggccgcggcacgtccacctacgacgggctatcgctggcgtgggcctgtgcggaaaatctggccaacaaaatcaaggcgctgacgctgttcgccacccactacttcgagctcacccagctgccggagaaaatggaaggcgtcgccaacgtccacctcgacgcgctggagcacggcgataccatcgcctttatgcacagcgtgcaggacggcgcggccagcaagagctatggcctggcggtcgccgcgctggcgggggtgccgaaagaggtgatcaagcgcgcgcggcagaaactgcgcgagctggagagtatctcgcccaacgcggcggcgacccaggtcgacggcacgcagatgtcgctactcgccgccccggaagagacctcgcctgcggttgaggcgctggagaatcttgatccggactccctgaccccgcgtcaggcgctggagtggatctaccgtctgaaaagcctggtctagccacccattaaggtgaaaaacggcagcgctgtgaagcgctgccgttttagtaaacaaaaaaatgggtgctagaggatgcgtcctgacaacccatacgcggggttgcccccgcgcggatgctacttcttcgattcgtaagcgagaacagctttaaactcaatattacgctctttaatactcagctcgcatagtgagctgtgcaccaacagcgtaaatcccagtaccgtaatacagagtacgatgattgccacaagggcatattttgtcagcatatcttgcctccctgcaaagaagagactaacatctgaattgtctatgttcattcgctagcctcagttgatagaaatatctcctggggctttcgtctgtctggggtcctggtaatgctcaaggccagacagcctcaagcacccgccgcaattctacactcgtcagggcgtgaaatttatctgcaaggaattaatcagacgaattttataataatctggatgcaggctcgcaaagtcatcccggtatattaacccttcacgtaattttttaatttaatgaaaaaataatttccataattgtactaaatataaaaaaggcccgacttagcgggcccctttcattaacgcttatcttccggcaatagcggcggtacgtgcggcacctgcggcgcctcatcgatatctttctgcgtcatgcggaacgcttccggatagtgttcgcggctggtgcggcgcagcggctcggtatctcgccaggtgtaaagacagtgctggcactgatacacggtccagacccctttcaccggcgaggtcgccatgacttcaatcttttcatcggcgcaacgtggacaaatcatcttcttctccttatttacggttggccagcatagcggtcagtttttcagcccaggctttggtttccggcagatcctgcaccggctggctgtagtgaccgcgaaggtccggcgcaaccggggtggtggcgtcgataatcagtttgtcggtaatgcctgccgggctggagcctgggtcaagttcaaggaccgacatgttcggcaactgcaccaggtctcccgccgggttaaccttcgaggagagcgcccacatcacctgcggcaggttgaacgggtcgacgtcttcatcaaccatgatcaccatcttcacatagccgaggccgtggggagtggtcatcgcccgcaggcccaccgcgcgggcaaaaccgccgtagcgttttttggtggagatgatcgccagcagaccatgggtgtacatggcgttgaccgcctgcacctccggaaattcggccttcagctgctgatacagcggtacgcaggtcgccgggcccatcagatagtcaatctcggtccacggcataccgaggtagagcgattcaaaaatcggtttgctgcgataagagactttgtcgatacgcactaccgtcatgttacgaccgccggagtagtgaccggtaaattcaccgaacggcccctcgatctcacgcttacgcccttcaatgaccccttcgaggatcacttccgaaccccagggcacgtcaaaaccggtcagcggcgcggtagcgatgggatacgggctctcgcgcagcgcgccagccatctcatattcagactgatcgtatttcagcggcgtggcgcccatcagggtaataatcgggtcgttaccgagggtaatggcgatcggcagatcttccccacgctcttccgctttgtgcagatgcagcgcgatatcgtgcatcggtaccggctgcaggccgagcttgcgcttgcctttcacttccatgcggtagataccgacgttttgcttaccgaagttatctttatccagcggatcgcgcgaaacgacacaggctttatcgaggtagaaaccgccgtcaccatcgttgaggcggaacagcggcagaatatcgaacaggttgatatcatcgccatcaacagtattttctgcccacgccgggttggcgcggcgctctggcgtcaccgggaagttatcccagcggcgaatgaactcatcaatctgctttttcaccggcgtgttaggcggcaggcccagcgagatggcatggttctgccacgagccgatggtgttcatcgtcacgcgagcgtcgttaaagccgcgaatattatcgaaccacagcgccggggcaccgtcgccgatgcgtccggtcgcattggcggccgccgccagatcgggctcagcgttcacctcttcactgattttcagcagttgtccctggtcatccagcgcctgcaaaaagctgcgcaaatcatcaaaagccattattcgatctcctgtgcaaattgttctgccgtgcgcaagccgttccagcggcgcgctttgtgatagtcgaggccaaactgatccagcacccgggtgacgatatgattggtgatatcgtcaaccgtctccgggtggttgtagtaagctggcatcggcgggaccatcgccacgcccatgcgggacagcgccagcatgttctccagatggatcgtgctgagcggcatttcccgcgggaccaacaccagcttgcgcccctctttgagcaccacgtccgccgcgcggcccaccagcccttcggcataacccgcgcgaatgcctgcaagcgttttcatactgcagggaataacgatcatgccgtcggtacgaaatgaaccggatgagatggtggcggcctggtctgccgggctgtgggaaaagtccgccagcgcggccacttcgcgcgccgtccagggcgtttccagctcgatggtggttttggcccatttcgacatcaccagatgggtttccacctccggcatatcgcgcagcgcctgcagcaatgccaccccaagcggtgccccggtggcccccgtcatcccaataatcagtttcattccagacctcattacttttgttcgtgtacgaactttatatttaaactaccccctccagctcttattggcaagatcgttcgtatacgtgcgcatttttaatcaaaacgcagaaagggtataaaaaggcgtacgaacggctatcatagaggtgacagttttgttacggagtattcatggagttacgaaacgaagcattccacctgctgcgccagctttttcaacagcataccgcccgctggcagcaggcgttgccggacctgactaaacctcagtatgcggtgatgcgctcggtagcggagcaccccgggatcgaacaggtggcgctgattgaagcggcggtcagcaccaaggctacgctggcggagatgctcagccgaatggaagcgcgcggcctggtgcgccgggagcacgatccggccgataaacgccgccgttttgtctatctgaccgacgaaggcgaggcgttgcttaaccgttccattccgcagggcaatgaggtcgatgacgagtttctcggccgtctgagcgatgacgagcgcgagcagttctcccggctggtgcacaaaatgatggcgccctgaacgggcgcttagccgaccttctcgcgcaggaagtcaataaatgcccgcacccgggtcggcaaatgctgcgagtcgggataaagggcatacacgccctgctgtgggaaatggtattccggcaggagcggcaccagctcccgctgcgccacctttttggctaccagccatgcgggcagcaaggcgacgccgcatcccgccagagcaaagctcatcagcgccgtagcgctatcagcagaaaaccgcggcgcgctggctatcgcgaaatccacctctgtctggtgatccgtgcgcagctgccagcgcagcggcgtcggcaggcgctcgtgaataatccactcagcttgcgccagatcggacagcgtctgcaccggatggcttgccagccaggccggagaggcgacgggcaggatcgcgaaactggctatccgcgtcgcccgatagcgggaatcggccagcgtaccgaggcgtatcgccacatcaaatcgttctgaaatgaggtcggcatgatgggaggaggagacgtggcgcacccgcagcgccggatgacgacgggcgaacgcggccagcgctggaatgataacctgcgcgccatactccggcgtggtggtgatccgtagctccccgcttaagccgctatggctggcccgcacctcatcctggagattttccgccgcgttcaggagcgccaccccgcgctgatagaacagcaccccggcgtcagtgagccgcaaacgccgcgtcgaacgcagcagcagcgtcacccccagctcattttccagctgccgtacgttaaagctgaccaccgccttggtctgccccagcgccgctgcggccagggtgaaactgccggcatctaccacggcgataaacatggtcacgcgctgaagattaagcatcgtcgtccggatgattgtcaaaaatattcagacagtatatcccgattagtcccgtttatccctcactgcggcaggtttacagtagccgcctgtctgagggagtgaaccatgacctaccgccaccgcgttgccaccgtttttctgttcggtttttttctcgatttgatcaatatgtttatcgccagcatcgcctttccggcaatcagccgcgcgctggcggtttccgtctcgcaactggcgtgggtcagtaatgcctatattctcggtctgacggtcgttgtgccgttcagcgcctggctcagcgagcgctggggggcgaaacggctgtttttactctcgctggggctgttcagcctcggcgcgctggcggcagggcttgccaacagcctgagcgaactgattttatggcggacgctgcaggggatgggcggcgggctgttaatccccctcggccaggcgctgacgtggccgctgtttcagccgcatgagcgcgcgaagctgtcggcggcggtgatgctggtcggcctgctggcccccgcctgctcgccggcgatcggcggcctgttagtcgaggcgttcagttggcgctgggtcttttacgccagcctgcctgtcgctctgctaacctttgtgctggcggtgcgatggctgaacgacacccacggtccggttcgcccgactcgctttcttccactgtcgctgctggccgatcccctgctgcgcttcgcgatgctgatttacctctgcgtgccggggatgtttattggcgtcaacgtggtggggatgtactacctgcaacgcgtcaccgggatggcgccgggggcaatcggtgccctgatggtgccctggtcgctggcctcgtttgccgccatcacctttaccggcagatatttcaaccgcttcgggccccggccgctggttgtcatcggctgcctgcttcaggcgatggggatcatgctgctgctgaagatcgatgcggacagcccgctggcgctgttgattctggcctttacgctgatgggcggcggaggcagcttatgcagcagcaccgcgcaaagcagcgctttcctgcatacgcctgccgaagagatgcctgacgccagcgcgctatggaatcttaaccgccagctcagcttctttgccggcagcgccctgctcgccctgctgctgagggtgttcccgccggcctacgcctggcagggggtatttattagcgccgccgtcattaccctgttgccgctgctgttttgcctgcggctgaataatcgggcgattatccatcgcctgcacaccactctggagaagtcatgaatccttatctgcaggaagtccttgatgcccatgtccttatcgaacgctggttaagccatggcgaaggaagcgctgaggcgctgatgaagcgttttgccgccgattttaccatgatccccttgagcggtgagaagatggactacccaacggtgagccgttttttccaccacgccggcggcagccgtccggggttagatatcgtagtggatcagatggaaatcatcagcgagtggcacgacggcgccgcagtgctatatcgtgaaagccaaacgctggcggatagcagtcagaacgttcgctggtcgacggcgatttttcagcaagcggaagggaaaattgtctggcgccatctgcaggaaacccgcctcggctagcccaaagaaaaaggccccgactttcgagggggcctttttgacagaaaacgtcttattcgcggaagagcgcttcgatattcagcccctgtccctgcagaatttcccgcaggcgacgcagaccttccacctggatctgccgcacgcgttcgcgggtcaggccaatttcacggcccacatcctccagcgtggcagcttcataacccagcagaccaaaacgacgtgccagaacttcacgctgcttggcgttcagttcgaacagccatttgacgatactttgcttcatatcatcgtcctgcgtggtgtcttccgggccgttctctttctcatcggccagaatatccagcagcgctttttctgaatcgccacccagcggagtatccacggaggtgatgcgctcgttcagacgcagcatacggctgacgtcatcgaccggtttgtccagctgttcggcgatctcttccgcgctaggctcgtggtccagcttatgggacaactcgcgcgcggtacgcagatagacgttcagctctttaacaatatggatcggcaaacggatcgtacgggtttggttcatgatcgcccgttcaatagtctggcggatccaccaggtcgcgtaggtcgaaaaacggaacccacgttccgggtcaaacttctcaacggcgcggatcaggccgaggttaccttcttcaatcagatccagcagcgccagaccacgattgctgtaacgacgggcaatcttcaccaccagacgcaagttactttcaatcatgcgacggcgtgaagcgacatcaccacgcagtgcgcgacgcgcgaaatagacttcctcttccgcggtcagcagtggggaataaccaatctctccaagataaagctgagtggcgtcaagtacgcgctgggttgcgccttgcgacagcagctcttcctcagccagatcgctatcactgggttcctcttctactaaggctttctcgtcgaaaacctcaattccgttctcatcaaattccgcgtcttcatttaaatcatgaactttcagcgtattctgactcataaaggtggctcctacccgtgatccctgagcaaagcaccttccacggcacatcaacaaacgacgcctggacgatttcccctgccctctctgcgagaggaacgtagacaccgccctggcgcctgttagctgatgcttcgcttatccgtactttgccaaattatcgctgcggtaagtactgcagcgggttgacggatttccccttgtaacgaatttcaaaatgtaatcttgttgagctggttccggtgctacccatggtagcgattttctgccccgctttgacttcctgttgctcccgaaccagcatggtatcgttatgagcgtaggcactcaggtaatcatcgttgtgtttgatgataataagattaccgtagccgcgcagtgcgttaccggcatagacgacgcgcccatcggcggtcgcgacaatagcctgtcccttactgcctgcaatatcgatacctttattgccgccttccgcgccgctaaagttctcgataaccttgccatcagtcggccagcgccatgttgagatcggcgaactggttgacgtactgcttgcagtcggctgggttgtgctcaccgttgttggtgccgtcaccggcgcgacaaccgttgtggttgtagtcgctggtttattattaggcaacatcttggtagcactctgttcacctgaagattcagaatacgtaatagtcggttgtgaagcaaccaccgcggtcgatttttgtgcagaagttgtgctggtcgtcgcaccgccgctcgctcttgcgctggcctgagaaacggcgttttcgccggtgatcggctggcctgaggcgttaccgacctgcagtacctgccccacgttcagcgcgtacggggccgggatgttgttgcgttgcgccaggtcgcggaaatcgttgccggtgacccaggcgatatagaatagcgtgtcgccgcgttttaccgtataggtactgccgccggtatagctacctttcggaatatcgccatatttgcggttgtaaacgatccggccatttaccgtctgtaccggctcctgcgccaccggcgccggctgcggctgaatggtctgggtctgcatcggctgaatcggctgcgcctgaggagcggacttgacgccggagggtggcggcgtaatcagcatgccggagttggtgctggaagaggcggcgccgccggcagagctaaccggcgcaggcggattattggtgttggtacacccggccagccagagtgaaaccagtgaaagagccgcaatacggctgacggtaaatttggtgcttcccgcgctcatttatcccccaggaatatgttaactgccaatatcttgcttaccgggcggcgcccggccaggacactgaaaaatgtgtccaccctacgcctaaagtcaggcaaaaaaaacctggaataatccgggtctcaggccagctcccccttcaccaggggaacaaagcgaacggcctcgacggtatcaatgataaattcgttgccccgacgacggatccgtttgagaaactgatgctcttcgccgaccggcagcaccagcacgccgtcatcatccagctgcgccagcagcgcggtcggtatttccggcggcgccgccgtcacaataatggcatcaaacggcgcccgcgcctgccaaccttgccacccatcgccatgacgggttgaaacattatgtaaatcaagttgtttcaggcgacgacgcgcctgccactgtaaactcttaattcgctctaccgagcatacgtgatgcaccagatgcgccaggatggccgtctggtagccggaaccggtgccgatctccagcacccgcgactccggcgtcagcgtcagcagctcggtcatccgcgccaccatatacggctgggagatggtctgcccctggccaatcggcagcgcggtgttttcccacgctttatgttcaaaggcttcatcaacaaacttttcgcgcgggaccagcgcgatcgcctcgaggacacgttcatcgacgatgccctgcgtgcgcagttgattcaacaaactttcaacacgtttacttaccattgcctgtcaaccccgacacgttccagccaatcggtgaccacctcatgcgcctgatgggcggttaaatcgacgtgcaatggcgtcacggaaacatagccttcatccactgccgcaaaatcggtgcccggcccggcatcgcgcttatcgcccggcggaccaatccagtacaggatgttgccgcgcggatctttttgcgggatcacctggtcggccggatggcggttgccgcagcgggtcacgcgaatgcccttgatttgatcaagcgggagatccggtacgttgatgttaaggatccgcccggtacgcagcggctcgcggcttaaggcgcgcagaatggtgcaggttaccgccgcggcggtatcgtaatgctgatagccgttcagcgacacggccagcgcggggaaccccagatgacggccttccatcgccgcggccacggtgccggaatagatgacgtcgtcgcccaggttggggccggcattaatgccggaaaccacgatgtccggacgcgggcgcatcagcgcgttcacgccgagatagacacagtcggtcggggtgcccatctggacggcgatgtcgccattttcaaaggtaaacgtacgcagggacgattccagcgtcagcgaatttgaggccccgctgcggttacgatcgggtgcaaccacctggacctcggcaaactcccttaaggccttcgccagggtctgtatccccggcgcatggatcccgtcatcgttactcagcaatattcgcatagtcacccgttgtattgataagctccctgaccacgctggtggcgaagctgcccgccggcagccagaaacgcagttcaacggttacgtcatcccaccagttccagctgagctgctgtggatagagaagcatcgcccggcgcgccgcctcgactttctcccgtaccagcagcgcctgcaacgcggtttcctcggcgatcgcggcctgctcgaaagccagggcgtcgcgctggcttccccagtcgccgctgcccggcagcgtggccgtaatcatcagttcgcggttatgcacccgcgcctgcgaaacctcgagttcttccggtgtgacgacaaaccagctcccgcgccccgctaattgtagcgcatcgccatcaacgacctgattaaattccgttttttttaatctaatactcacttgctgattaaacaacgcgctgcgggctgccgacaaccaaaaactgcgcttattgcgatcgcgcactggcgcgccgctctccgcccagcgcagggcgccctgcaggttactgccgccaatgccgaagcgctgcgcgccgaaatagttcggcaccccccgttcagcgatggcctgcagacgcgtctccacgtcctggcgatcgctaatctcgcgcaggatcacggtaaactggttgcctttcagcgcgcctaaacgcagcttacgcttatggcgagcatattccagtacctggcagccctcgagctgaaatttgctcaggtccggcatctctttgccgggcacccgggcgcacagccactgctcggtgaccgcgtgcttatccttttgcccggcgaagctcacttcacgggcgtggatcttaaggaattttgccagcgcgtcggcgacaaagcgcgtattgcagccgtttttcaggatccgcaccagcacgtgttcgccttcgccgtccggggcaaagcccagatcttccaccaccagaaaatcttccggattggctttcagcagcccactgctctgcggcttgccgtgcagccaggtcagttggtcaaaggcgatcatttgtcggccttacgcagcagcgcaaccgcttcgcaggcgatcccttccccgcggccggtgaagccgagcttctcggtggtggtcgctttcacgttgacgtcgtccatatggcagccgagatcctcagcgataaagacgcgcatctgcggaatatgcggcagcattttcggcgcctgggcaataatcgtgacgtcgacgttgccgagcgtatagcccttggcctgaatgcggcgccatgcttcgcgtagcagttcgcggctatcggcgcctttaaacgccggatcggtatcggggaacagcttgccgatatcgcccagcgccgcggcgccaagcagcgcgtcggtcagcgcatgcagcgcgacgtcgccgtcggagtgggccagcagccctttttcataaggaatgcgtaccccgccaatgatgattgggccttcaccgccaaaagcgtgtacgtcaaaaccatgtccaattcgcattaagctttctcctggtgtcgggaacgggtgaggtaaaattcagccagcgccaggtcttccgggcgcgtcactttaatattatccgcgcgtccggcgaccagctgcggatggaagccgcagtactcaagcgccgaggcttcatcggtgatagtggctccctcgtttagcgcgcgagtgaggcaatccaccagcagctcgcgagggaaaaattgcggggtgagcgcatgccacaggtcattgcggtcgacggtatgggcgatagcggttttgcccggctcggcgcgcttcatggtgtcgcgcactggcgccgcaaggatcccgccgacgcggctggtttcgcagagcgacagcaggcggctgaggtcgtcctgatgcaggcaggggcgcgcggcgtcatgcaccagcacccactgcgcctccggcaacgcctgcaggccggcgagtaccgaatcggcgcgctcagcgccgccatccaccacggtaatctgcggatgctgcgccagcggcagctggctgaagcggcgatcgccggggctgacggcaatcaccacccgctggacgcgcgcatccgccagcagcgcggcgaccgcgtgttcgagaatcgttttgttaccgattgagagatattgtttcgggcattccgtttgcatgcggcggccgaaaccggctgccggcaccacggcgcaaacgcccggaaaagtggctgccatgttgtaatcctgggcctggttatcgattgttctgctgttgccccgatgcctgattgcgtttagacgcatccggtaccagacgatagaaggtttcgcccgggcgggtcatgctgagttcattgcgcgcacgctcctcaatcgcttcctgcccgccgttgaggtcgtcaatttcggcaaacagctgatcgttgcgtgcttttaatttggcgttagtcgcctgctgggcggtgacgtcgtcgttaacccgcgtgtagtcgtgcaggccgtttttaccgaaccacagcgaatactgtagccagaccagcaaagctaataatagcagcgttagtttacccatcctgccccctgaaaaacggcatcatcatcccaaaactcgcccgggtacgctaccggggcgcgcggacgatgccgcgtaacgcggggactgtaccatatttttgctgtcgatacccatgcttgattcataccagcaacgggttatcccaacagccagaggaagagtagcgcaaacatcagcccaacggtcaggatggtcgcgctgacgctatagagcagtttgccattgagcagagagtgcagcgcaataccgaccaccaccgccaccggcatcaacgcaaggaagaatggccaggtgtagaggagaaagaagagtgtattactgccatagagaaggaagggaatacccagcgccagcagccacgaaataaagcccacggcagcgcccgacaaagaccaggtggtctcgtcgccgatcgccggaggcggttctgaacgaataatactgaggttctgggtattgcgcatatcgaatcctgtagaccgggcaaccggcacccctcgatgccgctgccgtttcaggatctgataatatcgctctgttgcagcaggtctaatagttggtgcaccaaatttgttaccaattgttcaccatccagatgaatttccgccttttccggtgcctcatagaccgagtctatgccggtgaaattgcgtaattcccctgcccgcgctttcttatacaatcctttcggatcccgcgcctcgcagatggccagcggggtatcgacgaacacttcgataaagcgtccttccccgaggcgctcgcgcaccatctgccgttccgcacggtgcggagatataaatgccgtcaataccaccagcccggcatcgaccatcagcctggccacttcgccgacgcggcgaatgttctctttgcgatcctcatcgctgaatcccaggtcgctgcacaggccatggcgcacgttatcgccgtccagcagataggtgctgacgccgcgctcatgcagggcctcctccagcgccccggcgacggtggatttacccgaccccgaaaggccggtaaaccacagcaccacgccgcgatggccgtgatgctgttcccgctgctgttgggtcacagggtgggcatgccagacgacgttttcgtcatgctgggccattatttgcctcccagcaggtcgcgggcgtcccagtgcgggaaatgtttacggatcagctggttcagctccagctcgaaggcgctgtactgtgatgccgaagtcgatgcctgcaggtgcggctcgttgaccatcccggcgccgacggtgacgttggtcaggcgatcgataaagataagcccgccggtcaccgggttttgctgatacggatccagcactaaaggttcgtcaaaggtcagctccaccaggccgatgccgttcagcggcagagactcgacttcacgctgggtcaggttgttaatatcgacctggtagcggatagcgtcgacgcgagcgcgggtcttcttgccggcgattttgatgtcgtagctctggcccggggtcagcggctgttcggccatccacaccacgtcgatgctggcgctttgtaccgccggcagcgaggcttgcgcgtcaaccagcaggtcgccgcgactgatgtcgatttcatctttcagcacaagggtaatggcttcgccggcggcggcttcctgcaggtcgccgtcgaaggtgacgatacgcgccacgctcgattcgacgcccgacggcagcaccttcagacgctggccaacctgcacggtaccggaggcgaccgtgccggagaagccgcggaaatcaaggttcggacggttaacatactgcaccgggaagcgcagcggctggctctcgaccacccgctggatctctacggtttcgaggacttccagcagcgtcgggccactgtaccacggcatattcgcgctctggctggcgacattatcgccttccagcgccgacaacggcacaaagcggatatcaaggttgcccggcagctgctcggcaaaggtcagataatcttcccggatctcgttgaagcgcgcttcgctaaactcgacgagatccattttgttgaccgccactaccaggtgtttaatgcccagcagcgtcgagatgaagctgtgacggcgggtctggtcgagcacccccttgcgcgcatcgatcagcaggatcgccaggtcgcaggtggacgccccagtggccatattgcgcgtgtactgctcgtgccccggggtgtcggcgatgataaatttgcgcttttcggtcgagaagtagcgataggccacgtcgatagtgatgccctgctcgcgctcagcctgcaggccgtccaccagcagcgccaggtccagtttttcgccctgggtgccgtgacgcttgctgtcgttgtgcagcgaagagagctggtcttcatagatctggcgcgtatcgtgcagcaggcggccaattaaggtgcttttgccgtcatcgacgctgccgcaggtcaaaaaacgcagcaggctcttgtgctgttgcgcgtgcaggtaagcttctacgccgccttcgttggcaatttgttgggcaattgtggtgttcatggcggctccttagaaatacccctgacgtttcttcagctccatcgagccggcctggtcgcggtcaatgacgcgcccctgacgttcgctggtggtcgataccagcatctcttcaataatttcgggtagcgtctgcgcttcagactccaccgcgccggtcagcggccagcagccgagggtacggaaacgcaccatccgtttttcaatcacctcgcccggctgcagatcgatacggtcgtcatcgatcatcatcagcataccgtcgcgctccagcaccgggcgctcagcggccagatacagcggcacgatttcaatattttccagatagatgtactgccagatatccagctcggtccagttggagagcgggaagacgcggatgctttcgcctttgttaatctggccgttgtagttgtgccacagctccggacgctgatttttcgggtcccagcggtggaagcggtcgcggaaggagtagatgcgctctttcgcgcgggatttctcttcgtcgcgacgcgcgccgccgaacgcggcgtcaaagccgtatttgttcagcgcctgcttcagcccttcggttttcatgatatcggtatgcttggcgctgccgtggacaaacgggttgatgcccatcgccaccccttccgggtttttatgcaccagcaattcacagccgtaggctttagcggtccggtcgcggaactcatacatctcacggaatttccagccggtatcgacgtgcagcagcgggaacggcagggttcccggataaaacgctttgcgcgccagatgcagcattacgctggaatctttcccgatggagtacatcattaccgggttagaaaattcggcggccacctcacgaataatatggatgctttccgcctccagttgccgcaggtgagtgagtcgtttttggtccataaccgttccttaagccagattgaccaccgaagcgttaaacccctcggcggatgatgtatgttgaaaccaggcgagctgctgatgcagctgcaccacttcgcctaccaccagcagggcgggcatcggggcgtctttcgccaggtgttcgagttgttgcaatgtgccggttatcgtctgctgatcgtcacgggtgccacgggaaatcaccgccaccggcgtgtcgctgtcgcgaccgtgggcgatcagctgggcgctgatttccgctgccttcatggtgcccatgtagatcgccagcgtttgttggctcttcgccagcagcgaccagtcgaagggggcgctgtccggcttatagtggccggtgacaaagacggcgctttgcgcataatcgcgatgggtcagcggaataccggcgtaggccgtcgctccggcggctgcggtgacgcccggcaccacctggaacgggatccccgcctcggctgcagcctgcagctcttctgcgccgcggccaaaaataaacggatcgccgcccttcaggcgcacgacggttttccccgccttcgccgcctccaccagcagctgattggtttcatgctgcggcaccgaatgctcgccggcgcgtttgccaacgcagatcagctcggcatcgcggcgcaccagctcgagaaccggctgagtcaccagatgatcgtggaaaaccacgtccgcctgctggatcgcctgcagaccgcgaagggtcagcagcccggcatcgcccggcccggcgccgaccagaataatttctcccgtctcacgttcgggcttatccagctcatcctgcagcgccttttccgcctccgctgagttgcccgccaccatcaggctggcgaagcggccggtaaagacgcgctcccagaagcggcgacgcgcttcggtagtcgtcaggcgggttttcagatggttgcgccagtagcttgctgattccgccagccgaccgagattcgtcggcagcagcgcttcgattttttcacgcagaatgcgcgacagcaccggcgctttaccgctggaggagatcgccaccagcagcggcgaacggtcgacgatagaagggaaaacaaacgagcacagcgcctggttatccaccacgttgaccaaccggtagcgcgcgttagctgccgcaaatacccgctggttaagcgcatcatcctcggtggccgcaatcaccagaaagacatcatccaccagcgagtcgctgaattccgtcgcccgccagctgagtgcctggcgcgcagccagatcggccagcgccggtgacagcgtttcagcgaccacctgcacctgcgcctgggcgcgcagcaggaacttgatcttacgttcagcaatctcgccgccgccgatcaccagcacgggcctttgtttcagttcggcaaaaaggggcaagtaatccacggtgcaacaactctcttacattcagcgatactgcgactatagggtgcgccttagagcaaatgaaattacgaaatggaatgagttgtgacacaaaggaataacgcggcggaaatacaaatatcaaaaagtgcttaacgcgctatttttccgctatttaagagcaattgaaattgtttaaccgcggtcacagtttcatactgtacgcgtcaaattgtcttgttcgtgtaaggaccccttatgttttccgcgttgtgccgccgtctgcttccgctggcgctcggcaccggttttgtttttgccgccgcccccgcattcagcgcgctgggcgacaccgccagtagccaggcccgccatatcgccaccgtcttcccgggacgaatgaccggaacgccgccggaaatgctctcagctgactatctgcgccagcagttcgccctgatggggtatcagagcgacgtgcgaagcttcaatacccgctatatctataccgacagcaatcagcgcaagaactggcataacgccaccggcagtacggtgatcgccgcccatgaaggtaaagtgcgccagcagattattatcatggcacacctcgacacctatgcgccgcagagcgataaagacgtggagaacaacctcggcggcctgacgctgcagggcatcgacgacaacgcgatgggacttggcgtattgctggagctggcggagcatttaaagaacgtccctacccgctatggcatccgctttatcgccaccagcggtgaagaggaaggccgtctcggcgcgcaaaacctgctgcagcggatgagcgaagcggaaaagaaaaataccctgctggtgatcaatctcgataatctggtggtgggcgataagctttacttcaacagcggccgcagcacgccggcctcggtgcgcaagctgacccgcgaccgcgcgctggctatcgctcgcagcaagggcatcgccgcctacaccaacccgggactcaatccggcttatccgaaaggcaccagctgctgcaatgacgccagcgtcttcgacaacgccgggatcccggtgctgtcggtcgaggcgactaactggtcactcggcaaaaaagatggctatcagcagcggagcaaatcggccagtttcccgcagggaaccagttggcatgacgtccagctggataatcagcagtatatcgaccacgcgctgccggggcgcatcgaacaccgcggacgcgaggtagtgaaagtcatgctgccactggtgaaagagctggcgaaggtggagaagaaaagctaatacgcacaaaagaacgcgcggtatcgcccgcgtgttctttttgaattatcactcagaggaagagctaacagcttaaccctcgtgcaatccgcactcgcgtttaagcccgaagaaccgggtctcttcttctgccatgcccggctcccacttgcgggtggtgtgggtatcgcctaccgagagatagccctgatcccacagcgggtggtacttcagcccgtgcttttgcaggtactgatacaccgtgcggttatcccagtcgataatcggtagcaccttgaacaccccgcgctggaccgccagcaccggaagcgtagcccggctgcccgactgctcgcggcgcagaccggcaaaccacgtctgcgcgttgagctctttcagcgcccggttcatcggctcaaccttgttgatctcattgtatttctcaatgccctcaacgccctgctcccacagcttgccgtagcgcgcctcctgccaggccgcgctttcagccgcgcggtagaccttcaggttcagcttgagcttgtccgtcagctcgtcaataaactgataggtttccgggaacaggtagccggtatcggtgaggatcaccggaatgtccgggcggatctgattcaccagatgcaaacttaccgccgcctgaatgccaaagctcgacgacagcacatagtttcccggcagattttccagcgcccacgccacacgcccttcggcgtcaagcttttccagttgggcgttggtttccgcgagtgccagaatgcgttccactttcggcaatgcattaagcgcgtttagatcgagtacggacatatgaacctcgtttgcctgttttgccggacgacactgcgttcgtccggcctacgggtttcgctggcccggatcgctacgcgccaccgggcaccaggatgttattcccagaaatcgcgggctgggtcgagcaccgggcgaatgatgcccgcacgcaccgtaaaatcgccgaagccttcacccgcttcgcgctctttcgcccagcgccctaccagttcgtctagcgagtcgagaatttccgactcggtaatattctcacggtacatccgcgggatgcgggtgccgttgcggttaccgccgatgtgcaggttatagcggcccggcgctttgcccaccagtcccacttccgccagcatcgcgcggccgcagccgttcgggcagccggtgacgcgggtgacgatatgctcatcgctcacgccgtgcttgctcatcaccccttccaccttgtcgataaacgacggcaggaaacgctcggcttccgccatcgccagcggacaggtcgggaaggagacgcaggccatcgagttttcgcgctgcggggtgacggcattcatcaggccatgatcccgcgcgagcttctcgatccgcgccttctgatcttccggtacgctggcgacaatcaggttctggttagcggtgatgcggaattcgccttgatggaccttagcaatctccagcaggccagtcttcagcggacgacccggataatcgagaatgcggccgttttcaataaacagcgtcaggtgccacttatcatcaatccccttcacccagccgatgcgatcgccgcggccggtaaattcgtacgggcggatcggctcaaacttaatgcctgcccggcgctccacttccgctttgaaggtttcgacaccgacgcgctcaagggtgtacttggttttcgcattcttacggtcggtacggttgccccagtcgcgctgggtggtcacaaccgcttccgccaccgccagcgtatgctccagcggcagataaccgaattcgctcgccgtgcgggcgtaggtttttttgttaccatgttcgatagagagaccgccgcccaccagcaggttaaagcctaccagcttgccattttcggcaatcgccacgaagttcatgtcgttagcgtgcagatcgatatcgttctgcggcgggatcaccaccgtggttttaaacttacgcggcagataggtctggccgaggatcggctcttcgtcggtagtggcgacctttttctgatccagccagatctcggcataagcgcgggtacgcggcagcagatgctcagagatctttttcgcccactcgtaggcctcagcgtgcagctgcgactcgtaggggttggaggtgcacagcacgttacggttcatatcgttggcggtggccagcgcgtccagccccaccgagtgcagcatctgatgcaccggcttgacgttctttttcagaatgccgtggaactgaaaggtctgccggttggtcaggcgaatactgccgtaaatggtgttctcagcggcaaacttatcgatcgccttccactgggtggtggtgatcaccccgcccggcagacggcagcggagcagcatcgcatgacgcggctccagcttctgggcggcgcgctccgcgcggatatcgcgatcgtcctgctggtacatgccgtggaaacggatcagcaggaagttatcgcctttaaaaccgccggtcagaccgtcgtttaaatcttccgcaatggtgccgcgcaggtagttgctctcaagcttcatgcgctcggcatcgctcagtttaccttcgaccactaaaggccccggatgtttttcgctcattagtagacatctcgctgataacggcgctcaacgcgcagctcacttaaaaattcgtccgccgcttcggcgtccatcgcgccgtattcggcaatcacttccagtaaggtgttttccacgtccttcgccatacgattggcgtcgccgcagacataaatgtgggcgccgtcattgatccagcgccacagctcggccccctgctcgcgcagtttgtcctgcacatagattttttgttgttgatcgcgggaccaggccagatcgatacgggtcagcagaccttccttcacatagctctgccactccacctgatagaggaaatcttcggtgaagtgcgggttgccgaagaacaaccagttcttgccttgcgctccgtccgcagcgcgctgctgcataaaggcgcggaacggcgcaataccggtgcccgggccaatcatgatcaccggggtctccgggttggctggcagacggaagttgtcgttgtgttcgataaagacacggacttcgccatcctcttccacgcggtcggcgaggaagctggaggcgccgccagcccgggcgcggccttcaatttcatagcgcaccacgcccacggtgacatgcacctcgctctccacttccgcctgtgaggaagcaatagaatacaggcgcggcgtcagcggacgcagcagaccgattaacgcctcagcgtccagctgcgctggagagaaacggaccatatcgacgatcggcgtcgcggcggcatactgctgcaactgagctttgtcgcccaccagcggcagcagcgattcgctgcgcgtcagggtggcgtagttttcaacgatagtcgcggtgttaaccgtcagctcaaaatgccactgcagggcttccgacagcggcagagttttaccctcaacggtcaccggctcgtcgcctttcagccacagcagctccaccagctctttcaccagctgaggatcgttctggtaccagacgcccagggcgtcgcccggctgatagcgcagaccggaatcaccgaggtctatttcgatatggcgcacatctttttctgaattgcggccggtgattttctgattgaccgacagggtcgccgtcaggggcgcttctttggtatatgggctggtgtgaatatcgttcaccgcgccgctggtggccagctgagcgggcgcagcgaccggcgcacgggccttcagcgcctcaaccacgcgcgcgcgccattcagcggccgcggcctgatattcaacgtcggcatcaacgcgatcgagcagacgttccgcgccgagctcggccagcttgttgtcgaaatctttgccggactggcagaaaaattcataagaggtatcgccgagaccaaagacggcgaacgcagtcccgtccagcttcggcgctttcttagagaacaggaacttatgcaatgcgaccgcttcttccggcggctctccttccccctgggtggacgtcactaccaccagcagtttttccgcagcaatttgtttgaatttataatcgcctgcattcaccagcttcacgttcagcttcgccgccagcagatcgtcacgcagcgcttcggcgacgcggcgggcgttgccggtttgcgaggcggaaatcagcgtgatcgtcggtacctcggcggccggggcgggggcggctaccgccgcgccggactgctgattcagcacgccccagaaatagccagatacccaggcgagctgagtgggcgtgaagtcagtggtggccgcctgaaggcgcgccagttgctccgggttgagcggcagcaagttggaaggtggggcctgtgtcgtcatgcgtcgtttgttccagtaagcaaagctgttattcgcaccctgtcagcgcgacaaaaacagaagagaatagaaggttaacggcgggcatagtaacaattaaagaagggatggaaataataaataaccaaatggactaacctgttttagttgtagttattaacaacaaaatcgattaaataagcaattgaaatataagagattaaatcaaataaagcagataaacatgtccattttctgttcacggccgttttagttaatgcgaaaaaatgtactttccggtaccctacggcggtttttttcgtcctgttgagagtcaatgatgtccaccacgctgtttaaagatttcaccttcgaagccgcccaccacctgccgcacgtcccggaaggacacaaatgcggtcgcctgcatggccactcctttatggtgcgtctggagatcaccggtgaagtcgatccccataccgggtggatcatggattttgccgagctgaaggccgcctttaagccgacatacgatcgcctcgaccactattatctgaacgatattcctggtctggaaaaccccaccagcgaagtgctggccaaatggatctgggatgagatgaaaccgcgggtgccgctgctgagcgccgtgatggtcaaagagacctgcaccgccggctgcgtctatcgcggcgagtaagcgaaaaaaagcccggtcagtacgctgccgggcttttttatcaggcaatattcagatacttgtgcgtctgcatagacaggcgccagttgcgggcgatgcaggtgtcgatacacaggcgcgtcgcatcttctttctgactgatcggctgcagggcgatgatccgcggtttgtcatcgctcagcgtttccagcagttcgtccagcgcttctatgtcgcggacgcgccctaccggatgcttgatctcatccgcccgctgcagggcctgagacagcacgtcatagccaccgcgcatgttgaccttcggggaaaccgtcacccaggtattggggctgcagcgtacttcatgggtgccgctggtttcaatctgacagctaaagccgttttgttccagaagcgaggttaacggcgttaaatcatgaatgcagggctcaccgccggtaatgaccacgtggcgggctgtccacccctgccgcccaataatcgccagcagatcctcgctgcttgccgggccccacttgtcgctctctttggttttcgccaggatgctgaacaacgacacttcccgatcggccagcttgtcccaggtatgcttggtgtcacaccacgcgcatcctaccgggcatccctgcagacgaataaagatggcaggcacgccggtgaagtaaccctcgccttgcagggtctggaacatctcgttaatcgggtactgcatagtcatctctgtttagggtgataaacgttcattatcgcagatttcgctgcccaggtcttgtcctgcgctgcgatcgcttttttacccctccgtcaatatccgtgtcgggaataatattattgattaaaaaggcaatcttttcttttggcttagtttattagcatgataagaattaaaataaatagcattctgacgcgcgggggggaaatatgtaacaaaaaatgttattcctgtcattcaggataaaataaaaggtccaagaaccaaaataaaaaaccttaaaatacagtaatgtacaaactgatacatgaaagagtgaattatctggccgatctgcgagtccaattctatcccccggtaataataaccttaaactggtcttaataaagccctgatcgggccccttttttatttaattgtcgtttacttttgcccgcctagaatcccgcagaccaaccataatgagatagcgtttatgaccacattattcattaccggcgttacggggtttctgggcggtgccgcgttagagaaaatactccatcaggaaacccggttagatctgctgctgctggtacgtgctgatagccccgaggctggcctcgaacgggttaaagagaacatgcgtaagttcaacatcgccgaggagaagctggcgatgttgcgccagcagcatatcctgctgggcgatctcgcctctccggagcattttcttaacgatccgcgcctcgatcaggtcacgcacatcctcaactgcgccgctgtcgcctcatttggcagcaacccgcttatctggaaggttaacgttgagggcacgctgcgcctggcgcaacgtatggcgcaggtgacgggtctgcagcgctttctgcacgtcggtacggcgatgtcatgttcgcctgaaccggattcactggtcgccgaaagcgcggagtttcgggaacgcgctgagcacctggtggaatatacccactcgaagtcgaccatcgagcagctgatgcagcagcagtgccctacgctaccgctggtaattgcccgcccctctatcgtggtgggtcatacccatcacggctgccggccttccagcagtattttctgggtgttcagcatggggctgatgctgcagaaattcatgtgctccatggaggaccgaattgacgttatcccggtggactactgcgccgacgccctgctaatgctgcttaaccagcctctggctcacggcgaggtggtgcatatctctgctggcgaagagaacagcgtgaagtttgccgaaatcgaccgggcgatggctcaggccctggagcaggcgccggtgggggataagtacgcccaggtgagctatgaaacgctggtcaaaatgagacgcgaactgaaagggatatttgggccatgcaatgagcggctgatgctgaaagccatgcgcttatacggcgcgttcgccacactgaacgtgcgctttagtaacgacaagctgctgagcatggggatgccaaaaccgccgcgctttaccgattacatcgaccgctgcgtggaaaccacccgcgggttgtcgatccctcagcaaatggccgtcgactttaaataatggccgcaggcgtaaaaaaaatgccagcccgaaggctggcatgattatttcacaaggataggattaagcctgacctttgatctctttacgaccgttgaacggcgcttgctcacctagcgcttcttcgatacgaatcagctggttgtatttagcaacgcggtcagaacggctcatagaaccggttttgatctggcctgcagcggtaccaacagccaggtcggcaatggtagcgtcttcagtttcgccagaacggtgagagataacagcggtgtagccagcgtctttcgccatcttgatagcagccagagtttcggtcagagaaccgatctggttgaacttgatcaggatggagttagcgatgcctttttcgatgccttctttcaggatcttggtgttggttacgaacaggtcgtcaccaaccagctggattttgtcgcccagtactttggtctggtaagcgaaaccttcccagtcagactcgtccagaccatcttcgatggagacgatcgggtactgtttggtcagctcttccaggaagtgagtgaactcttcagaggtgaacgctttgttgccttcgccagccagaacgtatttaccgtctttgtagaattcagacgccgcgcagtccatcgccagggtgatgtctttgcccagctcgtagcctgcagctttaaccgcttcagcgataacagccagcgcttcggcgttggaacccaggttcggcgcgtagccgccttcgtcaccaacggcagtgttcatgcctttggacttcagcactttcgccaggtgatggaacacttcagaacccatgcgtactgcttctttcagggtcggcgcgccaaccggctgaatcatgaattcctggatgtcgacgttgttgtcagcgtgctcaccgccgttgatgatgttcatcatcggaaccggcatggagtatttgcccggagtgccgttcagttcagcgatgtgcgcgtacagcggcaggcctttggacgcagcagctgctttggcgttcgccagagaaacggccaggatagcgttcgcaccgaagttagatttgttttcagtaccgtccaggtcgatcatgatcttgtcgatgccagcctgatctttagcatctttgcccaggattgcctgagcgatcgggccgtttaccgcagcaacagctttggttacgcctttacccaggaaacgggatttgtcgccatcgcgcagttccagcgcttcgcgggaaccagtagaagcacctgacggagcagctgccataccgacgaaaccaccttccaggtgtacttcggcttcaacagtcgggttaccacgggagtcgatgatttcacgaccgatgactttaacgattttggacattaggttttcctcagtacaagttaaactaaaactccagacaaacaatgcacccggatgggtgcattgccgttcaaactctttttacttcgcctggcgtttctggtactcgctcgcggctttcacaaagccggcaaacagcgggtgtccatcacgcggcgtcgaagtaaactccgggtggaactggcaggccacaaaccacggatggttcggcacttcgatgatctcgaccaactgatcatccccggaacggcccgcaacgcgcagaccagcagcttcaatcggtttcaacaacatgttgttgacttcgtagcggtgacgatgacgctcggtgatggtcggctcgccgtaaagctggcgtaccagagaatcatcactcagctggcactgctgcgcgcccaggcgcatggtgccgcccagatcgctcttctcagagcggacttcaacgttgccatcttcgtcacgccattcggtaatcagggccacgaccgggtatttacagtctggcacaaattccgtcgagttggcgttttccatacccgctacgttacgcgcgaactcaatcagcgcaacctgcatacccaggcagatgcccagataaggaatattgttttcacgcgcatagcgcgcggtggcgatcttgccttcaacgccgcggtagccgaagccgcccgggatcaggatagcgtctaaatccttgaggatttcgacgccgcgcgtttccacatcctgcgaatcgatcagcttgatgttgacggtaacgcgatttttcagaccgccgtgtttcagcgcttcaatcaccgacttgtaggcatccggcagttcaatgtacttaccgaccataccgatggtgacttcgcctgccggattagcttcttcatagattacctgttcccattcggccaggtttgcttccggacaagttaagctgaatcgtttacaaatataatcgtccagcccctgagatttcaacaggcccggaattttataaatggaatcgacgtctttcagagaaatcacagccttttccggaacgttacagaacaaagcaattttggctcgttcgttggccggaaccgcgcgatcggagcggcagatcagaatatcaggctgaataccgatggagagcagctcttttacggagtgctgggtcggcttggttttgacttcgcccgcggcggccatgtacggcaccagagtcaggtgcatgaacagggtatgctcgcggccgatctctaccgccatctgacgaatcgcttcgaggaacggcagggattcgatatcgcctacggtaccgccgatttccaccagcacgacgtcatggccttcgccgcccgccagtacgcgctctttgatagcgttggtgatgtgcgggataacctgaacggtcgcgcccaggtagtcgccacggcgctctttgcgcagcacgtcggagtagatacggccggtggtgaagttattgcggcgcgtcatcttggtgcggataaaacgctcatagtggcccaggtccagatcggtttctgcgccgtcttcagtaacgaacacttccccatgctggattgggctcatggtgcccggatcgacgttgatatacggatccagtttcatgatggtcacgttgagaccacgggcttcaagaatggctgccagggaggctgcggcaatgcctttacccagagaggatacgaccccgccggtcacaaaaatatagttcgttgtcatgctgaacctgagaagttagggtaaaacgatggaataaccaggacgggaaagtagtatacccgaacatgcgtgacgccacaaactttcattcttcccctccccttcgttcttcaagttgcacctgtgttgcgactcgaacaactcgaagaggcaggctacatggtgtttcaacgacataacggaaagagaaaatagacgcttttggcgaaatgtttttgacgtaaatcaagcgcttgttatttataaaatcacacaaatcgcgcttgatcacgaaaatccgttagagatcagtttcctggcgttttacttcctgccacacttcttccatggtatcgaggtcgacgccggtcatttccaggcctcgggcggcgacaatacgctcgacctcgcggaagcgacgctcaaatttgaggtttgctttctgcagcgccacctcggctttgacgcccaaatgacgggataagttcaccgtggcaaacagcagatcgcccacttcctcttccagttttgcttcatccaccaccgcctgctgcgcttcatgcatcacttcatcaatttcttcatgcactttgtcgagcaccgggcccagcgaggtccagtcgaaacccactgccgagcagcggcgctggattttatgcgcgcgcatcagcgccggcaggctatggggaatatcgtccagtgccgaatgctgggctttttccgcccgctccgcgcttttgatttgctcccagcgagccaggacttccgtgctattgcccgccgatgcctcgccgaagatatgcgggtggcgacgctccagcttgtcgctgatggcggcgcagatatcgtcaaagttaaagcgtccctcttcctgcgccatttgcgcatagaacaccacctggaacagcagatcgcccagctcaccgcgcagatcgtcaaaatcttcccgctggatagcatcgaggacctcgtaggtctcctcaagggtgtaaggggcgatggtggcaaaggtctgctctttatcccatgggcagccgttttccgggtcgcgcaggcggcgcatgatgccgagcaagcggtcaatttgagtcatgtgacaatcctggaaatttaaaaaatagtcggccggataaggcgtttagaccttatccgacgttgcgaaattgccggatggcggcttcgccttatccggcctgcagatgaattaaccgccgtgcagacggcgcgcgtcgatcacatccggcacctggttgagcttaccgagcacccggcccagcacctgcaggttgtaaatctcgatggtcatatcgatggttgccagctgctgacgggtatcgctgcggctggcgacgcccagcacgttcaccttctcattggcgaggatggtagtgatatcgcgcagtaaaccgctgcgatcgttcgcctccaccctgaccaccagcgagtagcccgccgagtagctttcgccccataccgcatcgacgatgcgctccggagcatgcgactgcagttcagccagctgatcgcagtccgcgcgatgcacggagatcccgcgcccctgggtgataaagccgacgatctcgtcgcccgggattggctggcagcagcgggcaatatggtgcatcaggttgcctaccccttccaccactacccggccattgtccttggtgcgattttgcggcgtgtaggttttctgctgcagttgcttcagcgcggccgcatcctgctcggcggcgctaggtttattgaactgcgcctgcaggaagttgaccatctggttgagacggatatcgccaccgccgatggcggccagcagttcatcgagctcgttgaagttatagcgcggcagcaggtgcttttccgcatccttcaggctgatgcccaaatgctccagctcgtcgtcgaggatctgccgaccggcgagaatgttcttgtcgcgatcctgcttacggaaccaggcgtggatcttcgagcgtccgcggctggtggtcacatagccgaggttagggttcagccagtcacggctcgggttcggctgcttctgggtaataatttcgatctgatcgcccatctgcagctggtaggtgaacggcacgatgcggccgccaattttggcgccgatgcagcgatggccgacatcgctgtgaatatgataggcaaagtccagcggcgtcgaccccgcaggcaggtccaccacgtcgcctttcggcgtaaagacatacacccggtcgtcgaagacctggctgcgcacttcatcgagcatctcgccggagtcggccatctcttcctgccaggcaatcagcttacgcagccaggcgatacggtcttcatagccgcggccgccgctggtgccggctcccgcgccctctttgtacttccagtgcgcggccacgcccagctcggcgtcttcatgcatctgccgggtgcggatctgaatctccaccgtcttgccgctcggccccagcaccacggtatgaatagactggtaaccgttgggtttcgggttggccacgtagtcgtcgaattcatccggcagatggcggtagtgagtatggacgatccccagcgcggcatagcaatcctgcaaacgctcagccacaatacgcaccgcgcgaacgtcaaacagctcgtcgaaagcgaggtgttttttctgcattttgcgccagatactgtagatatgcttcggccggccatagacttccgccttgacgccttcggctttcatctctgagcgcaggtggccgacaaactcttcgatgtaatgctcgcggtcgatacggcgctcgtggagcagtttggcaatgcgcttgtattccgccgggtgcagatagcggaagcagtaatcttccagctcccacttcagctggccgatacctaagcggttcgccaggggagcatagatattggtgcactctttcgccgcaagaacgcgctcatcttccggcgcgtccttgacctcgcgcagatgcgcgatacgctcagcaagtttgatgaccacgcagcggaaatcgtcaaccatcgccagcagcatacggcgaatgttatccacctgctcggaagagaccgagtcggtatgggtagccttcagctggcggatagcggccatgtcccgcaccccgtgaatcagggtcacgaccgatttacctacgctctcctgcatcacctcttcgctgacaacttcgccgtcggccagcgggaacagcagcgccgcgcgcagcgtatcgatgtccatacttagggtggaaaggatctccaccatttcgacgccccgccacagcagcaggtccgcctgcgggtgtccttgcgttttttcgcgacaataatcccaggtttcggctaagcgctcacacgactgctggctggaaattcccagactcgcgatccatttcttcgggtcaaattcaccagctttattaagatgtgcacttcttaccgcaaccattgtcctctccttaagggaccggcctgccgaagtcggcaagcctcaactttctacatgtcatcctgcaggtcgcgtcagcattcatggccagggtggctcttctgcgacgttgtgaatgaccttatgtaagcctgcgctcaaacaacaccattgattccagatggccggtatgcgggaacatatccagcatcgccaggcgttgaatctgatatccagcctgcaacagggtttcgctgtctcgcgccagcgtcgccgggttgcaggaaacatacaccacccgccgcggtgccagttttattatatgcggcatcacgcccggcgcgccggcgcgggccgggtccagcagcactttatcaaagccgtgcttcgcccaggcctgacgggtgacgtcttcttccagattttcatggaagaaagtgacatttgataaaccattgcgggcggcgttttcccgccccttctccaccagcgccggcaccccttccacgcccaccacatgggcggcgcgtgtcgccagcggcagggtaaagttgcccatcccgcagaacagatccagcacccggtcctctggccgcagatccagccactccagtgcggtacgcaccatctgctgatttacgccgtcgttgacctggataaaatcccgcgggctgaacactaagcgtagtccgtctgaggtataccatggcgcttcgccatgaatatgctccagtatctcgctttgtggcgcgaggtacagggaaagaccgtgagtttgcgaaaagcgttccagtttttccctgtctgtcgccggcagggctgcggtatggcgcagcaccatcagcgggccattgtccgcctgcaccagctcgacgtggccgagatggcgtaatgcgctcagcgcgcttaagcactcgcgcacagcgggcagcaatgcctcaagttggggcaccaaaacagggcactgcaccacatcgacgatcgctttggcgttggcctggcgaaaacccatctgcaattgttgggtcttcggctgataattcaagctcaagcgtgcgcgacggcggtagccccacggcgcgccggcgatgacgtcatctacctcgcgcttcatcagtcgccccagcgcggcgcgtttactttgctgctgaagcggaacgctggcatgttgttgttggcatccgccgcagacgccaaaatgggggcagcgcggcgcctggcgctgcgggctgtcggtcagtcggcgtttcacctcggcgcgggcgtactgttttttatcttccaccagcaccacctcggcctgctcgtggggcagcacgccgctcacgaacagcgccttcccctgatggcgggcaacaccctgaccaaagggatcgaggtcgttgactgtaacggttatgatctggcgcgtcgtcacacgccgttttgcagagtagaattgcgccatcgtagagagttgtctcaatcaaataaaacgagctcgttcagagcggcagcgccgcgaggcgcagcgacgctgcacagaacgatgatgtctatattctcccataatggaaccgcatgaccaactacagcctgcgtgctcgcatgatgattctgattctggcgccaaccgtcctgataggactgttgctcagtattttctttgtcgctcatcgttataacgacctgcaacgccagctggaggacgctggcgccagtattatcgaaccgctggcggtctccagcgaatatggcatgaacttgcaaaaccgcgaatccatcggccagctgatcagcgttctgcatcgtcgccactcggagatcgtgcgggccatctcggtgtacgattcgcataaccgcttatttgtcacctccaattaccagctcaatcccagcgaactgcagatcccgaaaggcgaggcattcccccgtcacctcagcgtcatccgcgatggcgacatgatgatcctgcgcacgcctattgtctcggaaagctattctccggatgaatcacccgaatctgacgctaaaatgccgggcaatatgctgggctacgtcgccctggagctggatctaaaatcggttcgcctccagcagtacaaagagatttttatctccagcgtaatgatgctgttctgtatcggcatcgcgttaatcttcggctggaggctgatgcgcgacgtcaccgggccaatccgcaatatggttaacactgtcgaccgcatccgccgcggacagctggacagccgggtcgaaggctttatgctcggcgaactggatatgctgaaaaacggcattaactcgatggccatgtcgctggcggcataccacgaagagatgcaacacaacgtcgaccaggcgacctccgatctacgggaaacgcttgagcagatggagatccagaacgtcgagctggacctggcgaaaaagcgcgcccaggaggcggcgcgcattaagtctgagttcctggccaatatgtctcacgagctgcgcaccccgctcaatggggtgatcggctttacccgcctgacgctgaaaaccgatctcaacgctacgcagcgcgaccacctgaccaccatcgaacgttcggccaacaatctgctggcgatcatcaatgacgtgctcgacttttccaagctggaagccgggaagctgatcctggagagtattccgttcctgctgcgcacttcgcttgatgaagtggtcaccctgctggcgcattccgcgcacgataaagggctggagctgacgctgaatattaagaacaatgtaccggataacgtcattggcgatccgctgcgtctgcagcagattgtgaccaacctcgtgggcaacgccatcaaatttaccgagcacggcaatatcgacgtactggtggagcagcgggccatcagtaattcccgggtacagatcgaaattcagatccacgataccggcatcggcatccccgagcgcgaccagtcccggctattccaggccttccgtcaggccgatgccagtatttcacgccgccacggcggcaccgggctcgggctggtgatcactcagcgtctggtcaaagagatgggcggggatatttcgttccacagccagccgaaccgcggctccaccttctggttccatatcagcctcgatctcaacccgaacgccattccggatacgctgaacaccgacgggcttgtcggcaaacgtctggcctatgtggaagccaacgcgacggcggcgcagtgtaccctggagatgctggccgctacgccgctggaggttatctatagccctaccttctcctcgctggcggaagcgcagtatgacattctgctggtcggtatcccggtttcaatgcgcgatttgtcgccgcatcgggaaaaattagccaaagcctgcgcgatgtccgataacgtactgctggccctgccgtgccatgcccaggtcagcgccgaagccctgaagcgcgacggcgttgccgcctgcctgttaaagccgctcaccaccacccgtctgctaccggcgctggtggctaccagccacgcgcttgcctccgcgccgctgatgcagatcgacagtcataagttgccaatgacggtaatggccgtcgacgacaacccggctaacctgaagctgattggcgccctgctggatgatcttgtgcagcaggtgatcctctgcgacagcggccagcaggcggtggacaaggccaagcagctgcagatggatctgatcctgatggatattcagatgccggatatggacggcatccgcgcctgcgagcttatccatcacctgtcccatcatcagcaaaccccggttattgcggtcaccgcgcacgccctggagggccagcgtgagaaattactgagcgccggcatgaacgactatctggcgaagccaatcgaagaagagaaactgcacgcactgctgctgcgctatcagcccggcctgcacagcgtcgttccggcgtcgctaccgcccgcagagccgatcgtcgatcataatcaaacgctcgactggcagctggcgctgcgccaggcggccatgaagccggacctggcgcgggagatgctgcaaatgctgatcgcctttatgccggaggtgcgtaacaaagttgaggagcagctggtgggcgagcagccggaagggctggtggatctgatccataaactgcacggcagctgcagctatagcggcgtgccgcggctgaaaaagctgtgccataccctggaaagtcagctgcgggcaggcaccgccgccgaggatctggagccggagctgcttgagctgttagatgagatggataatgtggcccgcgaagcgtgccggatgggggtgtaaaccccggatagcggcgctacgcgcctcatccggcctacgccctacggtccggtattcggttggtagccccggtaagcgtaagcgccaccggggatggttcccggatcgcggtgctacgcaccttatccggactacaaataccactgcgccagccgggttaccgcctgtcgcccatctgcaaaaccgcggctacgttacgcgccgtcattcgcaggttggcggcggcattggccaacgcttcatcaagggtacagatggtatacaacacgctgaataccgcatccagcccgtgctgatgcacgacgccaacatcggcggtaagactgccggcaatcccgatcaccgggacgttaaaacgcttcgccaccctcgccacccccaccggcactttgccgtggatcgtctggctatcgatacgcccttcgccggtgatcactaaatcggcatccgccacccgctcagccagctgtagcgcatcggtgacaatctcaatgcccggacgcaactgagcaccacagaacgcatacagcgccgcacccatgccgcccgccgcgccgccgccctcaaggctcagcacgtcgatatctaaatcgcgggcgataatccgggcatagtgccgcaggccgctgtcgagccggtcgatcatctgcgctgtcgcccctttttgcgggccgaacaccgcgctggcgccctgcgggccggtcaacgggttggtgacgtcgcaggcaacgtcaatccggcaatctgccagccgcgaatcgagttcgctgagatcgattcgcgccagcgtctccagcgcgccgcccccggaggcgatttgctggccctcggcggtcagcagtttcgcccccagcgcctgcgccatcccggcaccgccgtcattggtcgcactgccgccaataccaataatgatctgtcttaccccggcgtccagcgcatggcggataagctccccggtaccccaggaagtggtcagcagcgggttacgctgtgccggcgggacgctctccagaccgctggccgccgccatttcgataaaggcgcactggcgatcgccggacagcccgtaaaatgccttaaccggctcgcccagcggcccggtgaccgtcaacggaaccagaagcccgccggtcgccgccaccatggcttccaccgtcccttccccaccatcggcaaccggcagcttgacgtactcggcgtcaggataaatctcgcgaaagccttgctctatcgcactggccacttccagcgcgctcaggctctccttccaggaatccggtgcgatcactattttcatctgctgtccttactctgagccaacccctggcgctgtcgcgcaatgccggcccccgcagaggccggcggacttttagcgcaccatgcatggacgcttgttgtcaaaggtccagcccgggatcagatactgcatcgccatcgcatcgtcgcgggcgccaagaccatgtttcttatatagctcatttgcctgcatcacgcggtccatatccagctcaacccccaggcccggggtactcggtacctgcaccatgccgcctttgatttcaaaaggttgtttggtcagacgctggttgccctcctgccagatccagtgggtatcgatagcggtgatcttgcccggcgccgctgccgcgacgtgggtgaacatcgccagcgacacgtcgaagtgattattagagtgcgaaccccaggtcagaccgaactcatggcacatctgcgctacgcgcaccgacccctgcatggtccagaagtgcgggtccgccagcgggatatccaccgattgtagcgacagcgtatggcccatctgccgccagtcggtggcgatcatattggtggcggtcggcaggcccgtcgcgcggcggaactcggccatcacttcgcggccggagaagccctgttcggcgccgcacggatcttccgcataggccagcacgcccttcagctgtttaccaatctgaatggcctcctcaagcagccaggcgccattcgggtcgagagtgacgcgagcattcgggaagcgcttcgccagggcgctgatcgcttcggcttcttcaaaaccggccagcacgccgcccttcagcttaaagtcgttgaaaccatatttttcatacgccgcttccgccaggcggaccaccgcatccggcgtcatcgcctcttcatggcgcaggcgataccactcgcactgctcatccggctggctctgataggccagcggcgtcgcatggcgattaccgacaaagaacagatagcccagcatttcgacttcgctgcgctgctggccatcgcctagcagcgaggcgacgttgaccccaaggtgctggcccagcagatccagcagtgccgcttcgatgccggtcaccacgtgaatggtggtgcgcaggtcaaaggtctgcaggccgcggcccccggcgtcgcggtcggcaaactgattgcgcaccgcgcccagcacgtttttatactcgcccagcgttttgcccaccaccagcggaatggcatcctccagggtctggcgaattttttcaccgcccgggatttcaccgacgccggtatggccggcgttatctttgataattacgatattgcgggtgaagtacggggcgtgcgcgccgctcaggttcatcagcatgctgtcatggccggcaaccgggatcacctgcatggtggtgacaacgggcgttgaagagaaagtcgtcatagcatcatcctttttaattagtggcggccgaaaacgggacgtttgcggtcgaatgtccagccggggatcaggtactgcatcgggcccgcgtcgttgcgcgcgccgcccggcagcgctttataggcctcatgggctctgcgcacctgctcccagtcaagttccacgccgagtcccggcgcgtctggcacggcaatgctgccgttaataatctgcagcggatttttggtcaggcgcgcgtcgccctcctgccagatccagtgggtatcgatggcggtggggttgcccggcgcggcggcgccgacgtgggtaaacatcgccagggaaatatcaaagtggttgttggaatggcagccccaggtgagcccccagtcgtcgcacagctgcgccacccgcaccgcgccggagagcgtccagaagtgcgggtccgccagcgggatatcgacggcgttgagcatcaccgcatggcccatttcgcgccagttagtggctatcatattggtggcgaccggcagcccggtggcgcggcggaactcggccatcacctcccggccggagaaaccctgctcggcgccgcacggatcttcggcgtaggtcagaacatcctgcagccctttacacagcgcgatggcctcatccagcagccaggcgccgttagggtcgacggtgatgcgcgcatccgggaaacgctttttcagcgcccgcgcggtgtcgatctcctgctcgccgggcagcacgccgcctttgagcttaaagtctttgaaaccgtagcgatcctgggcggcttccgccagacgcactaccgcctcgctgctcaacgcctgctggtggcgcaggcggtaccattcgtgatcgcccggcgtatggtccagatagccaaggtcggttttctgccgatcgccgatatagaacaggtagcccagcacggtgacggcatcacgctgcttacccgggcccagcagctcgcagaccggcacattaagcacctggccgagcaggtccagcagcgccgcttccagcgccgccaccgcgttaaccttcagttcgaaggtccacgcccctttgccgaaggtgtcgaaatccgccgcctgattgcctttgtgcacctgctgcaccacgcgattgagtcgggcgacctcctggcccaccacctgcgggatcgccgccagcagcgtctggtagatgacctctccgccgggcgcttcgccgacgccggtatggccggcgttatcggttaacaccacgatattgcgggtaaaccatgcgttatgcgctccgccgatgttcagcagcatgctgtcgtgcccggccaccggaatgaccttcatctctgtgataatcgggctggattgagtagtcatgattaacgtcccgctacaggtttcagttcgatacgtttgatatcgcccaccagcaccagatagctcagcaccgccaccagggcatggataccgacgtagatcagcgcgccgttgaacgagccggtggtgccgacgatatagccgatggcgatcggggtgacgatgccggagatattgccgaacatattgaacagaccgccggagagaccgctaatctctttcggcgcggtatccgccatcaccgcccagccgagggcgccgatccctttgccgaagaaggccattgccataaagccgatcaccatccactccacgttgacatagttacacatcagcatggtcatggagagcagcatccccagcacaatcggcgttttgcgcgcaatgttcagcgagccggtgcggcgcattaaccagtcggagatcaccccgcccagcaccccgccgacaaagccgcacaccgccggaatggaggcgacaaagccggctttgaggatcgacatgccgcgcgcctgcaccagataaaccgggaaccaggtgataaagaagtaggttaaggcgttgatgcagtactgaccgatatagatgccgatcatcatccgcgagccgatcagttgcttgatctgccccattttgacgctaaacggcactttctgcgcgctgctcttctgatccatgttgatcagcgccccgccttcggcgatatagtccagctctttctggttcacgcccgggtggttgttcggatcgtggatcactttcagccacacaaagctgatcacaatccccagcccgcccataaagaagaacacatgcgaccaacccacctcatgcgtcagccagcccatgatcggcgcgaaaataacggtggcaaagtactgggcggagttaaaaatcgataccgctgtccccctctcctgcgccgggaaccaggcggcgacgatccggctgttgccggggaatgacggcgactcggcaaggccgacgaggaagcgcagggtaaacagcgcaacgataatgccaaagccgctgaagatatcgacgaagccctgcagcagggtaaacatcgaccagatgaagatcgaccagaaatagacgcgcttcgagccgaagcggtcgagcagccagccgcccgggatctggccgatgacataagcccatgagaaggcggagaacacataccccatccccaccggatcaaggccgatatccctggccatttccgaaccggcgatcgacagcgtcgcccggtcgccatagttaaaagaggtgacgataaacagcatcaccactatccagtagcgggcgttggtgcgcttttcagccgccgtcgccgcctgacttaatgaactcattgttgtactcctgaatcatagcgtttagctacgttcattctgaacagcacaacctgtagggtaatcagaatgacgtggtcgtgttttgatagttgtcgttatatctggcactgcatttatcactggctggagcagtatatgaagaggcacaccgcggctcaccgtgcatccacacagcttttacgccgctattgcaggtggtttgtggcgaatgcctgaaagaatggggggaagttcacggaaatgaaaagccagcgccgctggcgccgcatagcgcagcaaaaagggccggagtgtgaaatacctcacttgacccggtgaaactggctggcttaagccatgatattgttaaggatattgtggcgtttgcctaaaggcgtggcgcctggaaagcgctactattttgacgtccgcgtatctggccgcgacgtattgaaagagcgccctctgcgtagggagagggcagcgcttttatgcgagcagggtggcccactgctcaacccacggattggagacgctctccggctccgggtcttcgctggcgtcaatcttcagcatctcgccgatgcgcttcgcgccctgctcctgcagcagctgatcgaacttcaggccgccgccgcaaaagttggcataggtgctgtcgccgagcgcgataatgccgtaccgcaggtgaggctgatacatatctttgatgccctcatacagcgggacgatgctgtccggcagatcgccctgcccggtggtggaggtgaccaccagcacatacttacccgtgtaggattcccagtcgttgacctgcggatcctcatacacggtagccttgtgtcccagtccgctgaggatcgcttccgcttcttccgcgaccagcagcgagttgccgtacatggtgccgacaaaaattccgacttccgccatgctattatctccctggattgaccttattctcttcatcctgaccgctgtcgtcggcaaactcaaccctttcatttagcgggagaagcccgcgccagccaaactgcgacagcgcgcgcatccagacgtcgtcaaaaccggcgcgcagggtcagcggctcgccggtaaaaggatgggttaacgacagctcgctggcgtgcagcatcaagcggtgacagccgaaatgttccgcggcactgcggttttgccgcagatcgccgtgcttgctgtcgccgaggatcggatgacggaggtgggccagatgacggcgcagctggtgcttgcggccggttttcggctccagttccaccagcccatagcgcgaggtgggatagcgcccagtcgccactggcatctccactgtcgccagaccgcggtagtgggttaccgctggctgcggccctttatcttcgcgggcgaacttatcggcgattctatccagctcctccaccagcgggtaatccagcagcgcctcttccatcagccagccgcggacgatcgcatggtagcgcttccggatctggtgctgctcgaactgttgcgccagcagccggcccgcctcgctcgacaatcccatcagcagcacgccggaggtgggccggtcgagacgatgagcggtaaaaacgtgctgaccgatctggtcgcgcacggtctgcatcaccaccactttctcgtcgcgatcgagccagctgcgatgcaccagccagcccgagggtttgttgaccgccaccagccagtcgtcctggtagataatctccagcatcaggcctgctcaccggcaaacagcgcgtctaacagcagaagttccgccagcatggattcgcggaccgggtgggcctgatccagagccatttcgtaataaggcgcaacggcaaaattttgcggcagcggctggccgctctccagcagctggtgcatacgcgggatcaggacccactgcagccactccagcggctccagggtatccaggcaaaacggcttatcgctggcgaaggcgctgctgtcaggcgccgtctcctgccagtgctccgtttcgcgcagcagggcttcaatggcgcgcaggcgatcgcgcacgctatcgtgaagagtcatggggaaacctcgatgagttaaaaaccgggcgcaggatagcaaatccgcaggagaaataaaaaaagggagcactgtataaacagtgctcccggttcgttttgcagcagtcccgctacattggtgctccctgctcgtccttgaaaacttttcctgaggtctcctgaccatgttcatccataaacacgtgcatcctgctttcacaccaccccgatgcgaaatgacttatccataagtttgtcccgatcttcctgatccaccgttcatcctgagcggctctcgttctccatcctggaggtgtccattacgcgatcctgcgttatccttgcttcatcctgaagcctgtccctgcaacgccgtcctggcgggtcctgcagaagcgccatcatcctgatgttcgcttcatttcgcgacgtcctgtcgacagacataggatcactgattctgccccttcttacaacccttcttgagacaatctcttaagattagtccccactcaaaaggacgaaaaaattaagatctgatttaataccaacaacttatataaaaaagtatggattaaatttaccttaaatgatgacgatctcttacaggttttgtaagagatctctcacaaacgatctggcagactggattacagaactggctcaaggtggttgaggaaacccgcaagtgagggagaaagcgtaatgcgtttggcggtgccgagggtctctttgactacctcgccgctgagattacagacggatatcacatccagttcactctcgagggtggcgataaacagcgtcggcgacagcttcaaccgcttctgcaccaccaggtgcccgattaaattttcctgcacccgctggaaatcctcttcactccaggtctgcagcagcgtcaaggtttcgccggcaaaccggccggacatatcgccggcaaactgagtggtataataagaatgaagcggctgttgtaccacaatgtcgagggcgcgttcaaccgcgctgatattttgcgccagcgaaaacggctgcggctgccagaaaacggcctcgccctgggtgtcgacaacgcaaggcgacgggacgccgtaaagctcttcactgcgcggcaggctgtggcgctgctgctgccagacggcgcaatatcgttgggtaaaagcgcgtagcgcttctgctgtctgatggtccaccggtttctctcttcacgttagacaggatacactggagcaatagtgtacccgctttactatggtgaaacatgtcttcttacgataatcatcaggcgctggccggcctgacgctcggtaaatcaaccgattaccgcgatacctatgacgcctcgctgctgcagggcgtgccgcgcagtttaaaccgcgacccgctgggcctgcatgccgataatctgccgtttcacggcgccgatatctggacgctgtacgaactctcctggctgaacggcaaaggtctgccgcaggtggctgtcggccacgtcgagctgcccgataccagcctcaatctggtggagtcgaaaagctttaagctctatctcaacagctttaaccagacccgtttcgctagctggcaggacgttgcagagacgctgactcgcgatctcagcgcctgcgcgcaggggaaggtgaaggtatcgctctaccgcctggatgaactggaaggccagccgattgcccgcctgcacggcacctgcatcgacgatcaggatatcgagatcgataactatcagttcagcgccgattacctgcagggcgccgccagcggcaaaatcgtggaggagacgctggtcagccacctgctgaagtctaattgccttatcactcatcagccggactggggctcggtgcagatccagtatcggggggcgaaaatcgaccgcgagcagctcctgcgctatctggtttcgttccgccaccataacgaattccatgagcagtgcgtcgaacgtatctttaacgatattctccgtttctgccagccggaatcgctttccgtttacgcccgctatacgcggcgcggcggtctggatatcaacccctggcgcagcaatggcgacttttcccccgccaccggccgcctcgcccgtcaataataaacaatttcacaatttgcgtgcgtttaggcgcgcgcaaggttgtggaaacgccgttcgcagggctattgtaatcacaggaagaccataagcgtcctgtaaggagttcacttgattacacatgttagcccgcttggttcaatggatatgctgtcgcagctggaagtggatatgcttaagcgcaccgccagcagcgacctgtaccaactctttcgcaactgctcgcttgctgtgctcaattcggggagcctgaccgataacagcaaggagctcctgtcccgtttcgaaaatttcgagattaacgtgctgcggcgcgaacgcggcgtgaagctggaactgatcaacccgccggaagacgccttcgttgacgggcggattatccgctccctgcaggccaacctgttcgccgtgctgcgcgatatcctgttcgtttacggccagatccacaataccgttcgcttcccgaacctcgatctcgaaagttcggttcatatcactaacctggtgttctcgatcctgcgcaacgcccgcgcgctgcacgtcggcgaggcgccgaacatgatcgtctgctggggcggccactccatcaacgaaaacgaatatctctacgcccgccgcgtcggtacgcagctgggcctgcgggaactgaatatctgcaccggctgcgggcctggcgcaatggaggcgccgatgaaaggcgccgccgtcggccatgcgcagcagcgctacaaagacagccgctttatcggcatgaccgaaccatccattatcgctgcggaaccaccgaacccgctggtcaatgaactgatcatcatgccggatatcgaaaagcgtctggaggccttcgtacgtatcgcccacgggatcattattttcccgggcggcgtcggcactgccgaagagctgctctacctgctgggtattctgatgcaccccgacaacaaagcgcaggtgctgccgctgatcctcaccgggccgaaggagagcgccgactacttccgcgtactggacgagtttatcacccataccctgggcgaatcggcccgtcgccactaccggatcatcattgacgacccggcggaagtggcgcggcagatgaaaaaagcgatgccgctggtgaaagagagccgtcgcgagaccgatgacgcctatagctttaactggtcgattcgcatctcgccggacctgcagatgccgtttgatccgacccacgagaacatggccaacctcaaactctccccggatcagccggtggaagtgctggccgccgacctgcgtcgcgccttctccgggattgtcgcggggaacgtcaaagaggtgggcatccaggccattgagcagtacggtccttacaaactgcacggcgatccggagatgatgcgccgtatggacgatctgctgcagggcttcgtcgcccagcaccgcatgaagcttccgggcggcaccgcctatattccttgctacgaaatcatcgcctgatttccccctctcccgccggggcatcgcctgacgcctgcccccggcgggctctcttcctctgacttccagaacgcgctaaaaacctttctgttactaatcaatcacctgaattatttctacatagccaaacgtttgcgttggtaaaaactgcgacaattatcactgcaaaaaatggttttaagcgcaaaaacgtcgactagttctcttttttacagtaaatccctcgttattacgccgctccgcttttatctcatatgctgcaaatggtagccttcgcgccacaaatcgctggctgatcaccagaaacaggctgttggactaaaaatacgcacattgaaagtggattattgcatttgagatcgcgatcactgatgcataaaccatataaatgtatctttccggcccaattattacggagaaaatttctaaaaaaaccgtaattaaacgaatttcatgttacgcaattgtatttattcattagattttgttgattcctccaggagatacagatggaaaccactcaaaccagcaccatcgtttcgggcgaaacccgcagcggatggcgtaaaaccgacaccatgtggatgctgggcctgtacggcacggcgattggcgcaggcgtcttgttcctgccgatcaacgccggcgttggcggcatgatccccctgatcatcatggcgattctggccttcccgatgactttcttcgcccaccgcggcatgacccgcttcgtgctctccgggaaaaacccgggcgaagacatcaccgaagtagtggaagaacacttcggcgtaggcgcaggtaagctgattaccctgctttatttcttcgctatctacccgatcctgctggtttacagcgtggcgatcactaacaccgtcgaaaccttcatggcgcatcagctgcacatgacgccgccgccgcgcgccattctgtcgctgatcctgatcgtcggcatgatgaccattgtgcgtttcggcgagcagatgattgtgaaagcgatgagcgtgctggtgttcccattcgttatcgcgctgatggtgctggctctgtatctgatcccgcagtggaacggcgcggcgctggagacgctctccctgagcggcgcttccgttaccggcaacggcctgctgatgaccctgtggctggcgatcccggtgatggtcttctccttcaaccactcgccgatcatctcttccttcgcggtagccaaacgtgaagagtacggcgaaggcgctgagaagaaatgctccagtatcctcgcgcgcgcccacatcatgatggtgctgaccgtgatgttcttcgtcttcagctgcgttctgagcctctctccggcagacctggcggcggcgaaagagcagaacatctcgattctgtcttacctggcgaaccactttaacgcgccaatcattgcctggatggcgccgatcatcgcgatgatcgccatcaccaaatccttccttggccactatctgggcgctcgcgaaggctttaacggcatggtgatcaaatccctgcgcagtaaaggcaaatcgattgaaatcaacaaactgaacaagctgaccgcgctgttcatgctgatcaccacctggattgtggcaaccctgaacccgagcatcctcggtatgatcgagacccttggcggcccgattatcgcgatgatcctgttcctgatgccgatgtacgcgattcagaaagtcccggcgatgcgtaaatacagcggccatatcagcaacgtcttcgtggtgattatgggcctgattgccatctccgcgatcttctactctctgttcagctaattcattcaacgcctccccccgcgccgctttacggcggcgcgctttccgacagcacgggaatacatatgatcagcgtattcgatatctttaaaatcggcattggcccttccagctcccataccgttggaccgatgaaagcgggcaaacaattcactgacgacctgatcgcgcgcggcctgctggccgaggtgagcaaagtcgtcgtcgacgtctacggctccctctccctgaccggtaaaggccaccataccgatatcgcgattatcatgggactcgccggcaacctgccggacaccgtcgacatcgacgccattccgggctttattcaggacgttaatacccatggccgcctgatgctggccaacggtcagcacgaagtggacttcccggtggatcagtgcatgaatttccatgccgacaacctgtcgctgcatgagaacggcatgcgtatcaccgccctggccggcgacaaggtgctctacagccagacgtattactctatcggcggcggctttatcgttgatgaggagcacttcggccagactaccgaggcgccggttgccgttccttacccttacaaaaacgccgccgacctgcagcgtcactgccgtgaaaccgggctgtcgctctccggcctgatgatgcagaacgaactggcgctgcacagcaaagaagcccttgagcaacacttcgccgcggtgtgggaagtgatgagcgccggtatcgagcgcggcatcaccaccgaaggcgtcctgccgggcaaactgcgcgtcccgcgccgcgccgccgcgctgcgccgtatgctggtgagccaggacaccaccaacagcgatccgatggcggtggtcgactggatcaatatgttcgccctggcggtgaacgaagagaacgccgccggcggccgggtggtgaccgcgccaaccaacggcgcctgcggtatcgtgccggcggtgctggcctactacgacaagtttatccgcaaggtgaacagcaactccctggcccgctatatgctggtcgccagcgcgattggttcgctgtataagatgaacgcctccatctccggcgccgaagtcggctgccagggtgaagtgggggtcgcctgctcgatggcggcggccggtctggcggaactgctgggcggcagcccgggtcaggtgtgcatcgcggcagagatcgctatggagcataacctcggcctgacctgcgacccggtcgccggccaggtgcaggtgccgtgcatcgaacgcaacgctatcgctgccgtgaaagcggtcaacgccgcgcgaatggcgctgcgccggaccagcgagccgcgcgtgtgtctcgataaagtgatcgagaccatgtacgaaaccggcaaagacatgaacgccaagtaccgggaaacctcccgcggtggtctggcgatgaagattgttgcctgcgattaacctgctggcccgccacgcgtcggcgtgtcgggccatcgtcctgcataactctttttgttatatcaataaaattttagttatttaatggttataagcgctgtttgttaccttacgcaaaaccgctaaggagaacagacaatgtccaaccgattccgccccgcctggctgctggtcctcgccgccctctctacctccgcgctggccaaagcgccggaaaccgtcaacatcggctatcaaaaggcgaatatcttcgcgctgctgaagtaccgcggcacgctggatgagagcctgaaaaaacagggcattgccgtacgctgggtcgaattccccgccgggccgcaaatgctggaggggctgaacgtcggtagtatcgatctggccgcaaccggcgatgcgcctccggcctttgcccaggcggcgcaagccgatctggtctaccttgcccactcccccgctaacccgaaaacggaagcgattgtggtgcctgaacagtcggcaatccacagcgtggccgacctgaagggcaagcgcgtggggttgaacaaggggtctgacgtcaactacctgctggttgccgcactggaaaaagcgggcctcagctataaagacatcaccccggtctatctgccgccggcggacgcccgcgccgctttccagcgcggggcgattgatgcgtgggtgatctgggatccgttcctcgcagaagtggaaaccaacgcgaaagcccgacagatccgcaatgccgaggggctggtgccgcactacaccttctatctcgccagccgcaagtttgcagatacctacccggagacagcaaagcaggtggtggatgagctgggtaaactcagcgcgtgggcgaacagccatcaggacgaggccgccgggctgctgtcgacctcaaccggactggataaagccatctggctgaagaccctggcccgcctgccctacggtgccgaacgcatgaccccggcggtgtataacgaacagcaggcgctggcggatacctttacgcgcatcggcctgctgccggtgaaagtcgacgtgcgcagcgccacctggtcgctggataaaccttgattttcctgacgacgggaagcactgcgcctcccgtcgccgacaggcttaccccgccgttttctcaccattgcctatctgccagataaaggtgggcgcttcaccgttcaccagccagttaccgatattacgtgccttataaatcaccggattatgcgaggcaaccgtccgcgcattgcgccagtggcgatccagcgcaaggcgagttcgcgtatccgacgccccgagggcattaaacagctccgtcgccgcccgcgggatccagtcgctggcgatcacctgcgcctgcgccgcttccacttccgccagctggttacgccgggcaatcaatgcttcgtcgtcgctgacgtgcgccacataggcctgctgcagcgattccgcggcctgcaggaccgcggcccgggtcgcccatgcccagctgctgatctgcccaacgacctgcagaacctgggcgtcatcgcgcggcacggcggcgttgccgtggctgtacatccgggagcgatgtttgacgccctgcgcggcatcccgctcaaccgccaggccaatgcccgcgagggtcgccagcagcacatgctggtagaaggcggtctgatagcgaaagcgctgggcaaaatcatagacatgttcggtttccacccgagcgccggtaaagcgggtggtcccgctgccggtcaaccgctggccaaagccatcccagtcatcttcccgcaccacgccggtctgctgggtgctgaccagggctatcacatcgctggcggtatcactgcgccgggcaaacacatcgatccagtcggcgtacagcgcgccggtgctgtaaaacttctcgccgtcgagtcgccagccgccctctgtcggcgtcactctggtgttcacctctcccagcttaaccgcgccgatctccgtccagccgctgcccaccagctcaccgtcgaggaagcgacgaaaccagcggtcgcgcccggcggaatccggctgattcagctgatcttccacaaaggcaaagtgcgcgcgcagggcctgcggcaggttagagtccgcttgcgccagctcgatcagcagcgcgctgagctgcggcagcgaagcgccccagccgcccttctcgcgcgggatacgcagcgtgccgaagcccgcttctttcagccagcggatcggctcatcgggcagaatgcgctgctgttcgcgctccgcagcgccctgggcgatacgggtgaatatcgggcggaaggcggccgccagcgcgtcataatcggtgccagtagagagcagggtcattgtcagttccttattcatgaagtgcgtcgatatcttctcgcgtcggttcatgacggaccgccagcaggaagaaaatgggaataatggcggcaagcgagaccacccagaacatctgcgtgccgagggaggcctgcagcagcggcagaataaacaacgccagcgcgctgccgatcccggagagtgcccggctgaaaccgaccccggtggcgcgaatggcagtaggataggagagcgccgggtagatcatcagctgcgcccccgggccaaacccttcggcgaacagccacagccccagcatcgcgatagccagcacgatacctgccgtcgcgtgcggttgccccaccagcgccagcacaatcagcgccacaaactgcagggcgaagccggctatcgccacatgacgcgaaggatatttccacgccagatgcataccgagcagcccaccggtaaaagcaaacagggcgttcagccccagcgatgccgaaatagtttcgaagacgccagccccgaggaactgggcaagaattgacggcaggaaaaaggcaatcgccgtgtactcgaaggagatacagatattcatcaccccggcgacgatagtccgctcgcggtagggtttttcgaacagcacgcggaagctcactttcgacgctggcgcgggcttcgccgccgggacctcatgggcatggatcccccaggagtcgcgtaaaatacgcactgcagaggtcagatcgccctggttcgccgcccacagcggggattcattcataaatcgactgcggacggcaataatcagcagtgccggcacggcgccgaacagcagggaggcgcgccatagccagtcaagatgctcctgcggcagcaggaaatagaggccgaagataatgagaaagcagacggttgaggcggcgtaccacatcgggcaccacgccgcgaggcgagccgctttgttgcctttgccggcaaagcgggaaaactcggccagataggacatcgctaccggcaggtcgatgccaacgccgatgcccatcaggaagcgggcgccaatcaacacccagacgttcggcgccagcccggcggcgatagccgaaatcacgaaaaagaacatatcggccataaaaaccgaatagcgaccatatttatcggtcagccagccgccgataatattgccgacgatagtcccgaccataatggacgaagtcaccaggccggtcagcagcggtgagagctgaaattcacgtacaacgtcatcaataccgtaggagagcgtggttaagtcatatgcgtcgagaaaaacgccccccagcgcgaggaagacaatcatccgcgcatatttcgcttgttccttgccggaattaattagacgcgccacatccccgacgctactgaccggtaccgaagcgataccgggattatccactggtaatgtactcattttttcaccttattattttgtgcaggtcatcagcggttatagaccgcgcgcgacgagaatcaaaacaacaaatcattctataaaaatcaatataatcaataagttaataaatatcaccagcacaaaaaggacgcgttttcacgcatcctcaagggaaataaataacaacgaaaatagacgtcgtgcaggacgcttattccgcggacactggaactaatacgtcttttaccagcgggtcatcggtggtttttaaccacgtctggatccgcgggtcagaaaaagcctgttttaatttgacgatattttcctgcgataaatacggtgtaccaatcactaattgcgaagcaaaggtgcgcggcgccggcgggaataatatgcctttctcacgcggcactttcccggcgtcaaattgcgagacatagccgatggcggcatccaccgaatttaacgcccgcggtatggtcagcagatccagctctttaaagacaaactgatgcgggttaccgacaatatttttcagcttcgccgtgcgcggctccaccgccgggtcgagcgagatcaacccaatgcgctggagcagccacagggcctgcccctgattggcgccatcgtcaggcacgacaatggtcgcgccgttgggcaacgcctgtaccgacgagtagcggtcggaatagatgccaaacgcccactggaacaccggcaccgtggtcgacagcgcaaagccgttagcgtccaccacctgtttaagccaccactgatgctgatagatcgtcccggcatactgaccttccgctaccgcgcggtcagcctggaccggatcctgcactcccaccgcctccagtttcagaccgtaatcgggcgcaatatgctgattaatatactcaatgatccgctgctcgccggccatcgccggctcgtagtgaatttttaacgtgctgccgaagaccacctgctggctttgggtatgtccccgccaccaccagaaggcgatggcgagcaggataatcaccgccagcgccgccagccagggccagcgccgcgctttacgtaactcaaattgctctgttgtcatacaaggttcccctgcgtgtggcgtaaacggttgaccagacggtcacccaaaaattgaatcaactggatcgtggcgatcagggcaacgatcgtcgcgatcatgatgtggttgtcgaagcgctgatagccgtacaccacggccaggtagccgatgccgccggcgccgatggtcccggcgatagccgaatactcgatcatcgagaccaggtttagcgtcaccgccgccgccagcgcgggcatggcttcactgagctgcgcgctggcaatgatttgccagcgcgacccgccgcagacgacccccaccgcggtgacctccgccggcaactcgcgcagcgcgttctccaccagacggccaaagaacgggacgccggcggcgatcatcggcactaccgcggcggggatgccaatcgtggtgccggtcagccagtaagtgaacgggataatggcggccatcagcaccagaaacggcagcgaacgtcccatattgaccacccagttcagcagccggtacagcagtgcgtgcggaaataagccccgcggcgaggcgttaaacaacaccacccccaccagcccccccagcgtgacgacaaacagcatcacaatggccaccatcagccaggtttcgccataggcggggagcagcagcgaagggatttcgccccagggggtatcctgactgatgactgtcggtttcataccgcctccctgagcaacggcgcgctgtcgaggatctccgccgttatgccgagctgcgccagcaggccctgcagtcgcgcgggcgacaggcgttcgccctgaaagcgcactccggcctgcaggcgaccggccagccgaccattaatcacctcgacgtgaccgccaaggagatcgatctgcagcccccactgctggctcaggcggctgatccagtcggtggccaccggcacatcccagcggtagctcagacgcagcagcagatcgctatgggtagctgccgccggcgtcagcggcaacagctgctggccgagcagagaatcgggacgcgccagcagatcttcgatccgcccgtactggacgatcgtcccgtcgcggatctccgccaccgcatccgccgccgtgcgcaccgcgtccatttcatgggtaatcaggacgatcgccagctggtactcatcacgcagccgcttgagcagagccagcaccgaggccgtggcctgaggatcgaggccggaggtggcttcatccgccagcagaacggacgggcgcacgccagcgcgcgggcaatgccgatccgctggcgctggccgcctgagagctgggccggccaggcatccgctttgtggctcaggccgacgctctccagcagctcgccaacccgcgccttgatatcgcgctccaccacaccaagccacgccagcggcagggcgacattctcccaggcggtcctgcggctcaacagcgccgaagactggaaaacggtgccaatcgcccgccgttcccggcgcagcgcctcgccggacagcgccgacagatccttgccattgatacgaatgctgccgctgtccggttgctccagcaggctgatgcagcgcgccagggttgatttaccggcgccgctcggccccaccaccgcggtgatggagcgctcaggcacctgcagcgacagccctttcagcaccgcgctgagccggccatccgccgtgcggtaacttttatgcaggtcatcaatagcgatcatgtcaccttctcctctaccgatgccgccgtgcgcgcatcgcggcggtagctggcgcccgggtgaggcgcggccagacgcgggccgccgccgaacagtttttcgcgcagggtcccctcgcggtactcttgcttaaagacgccgcgcttttgcagctcaggcaccagcagctcgacgacatcgcggaaggtttcgtgagtgacggcataggcgaggttaaagccatcgacgtccgtctcttcgacccaggactgcagttcgtccgccacggtttgcgcgctgccaaccaccagcggaccgaagccgccgatccccgcccaatcggccagggcctgcaccgtccactggcggttcggatcagcggtcgaaaaggcctccaccgccgactgaatggcgttggtgtgcagatacttcagcacctgatccggctgatactggccgaaatcgatccccgtccagccggagagcagcgccagcgcgccttcatagctgacgtactgcttatattcctgccacttcgcctgtgcctcgcggtcggtgtcgccgacaattaccgtctgcaggttgaagatcaggatgctgtgcggatcgcgccccgcctcagctgcccggcggcgaatatccgccaccgtcttcttcagcagcaccttcgacggcgctgcgacgaagacgcattcggcatggccggcggcgaactgtttgccgcggctggacgcccccgcctgatacagcaccggcgtgcgctgcggggatggctcgcagaggtggatccccggcacggaaaagaactgtccctgatggttaatgggatggattttccgcggatcgctgaagatcttccgctctctgtcgcgcagcaccgccccgtcctcccagcttccctccagcagtttgtagatcacctgcaaatactcatcggcatagtcatagcgggtgtcatggtcggtctgggtctgctggccgatattgcgcgccccgctctccagataggaggtgacgatattccagcccacccgccctttggtcagatgatcgagcgtcgacagacgacgagcgaaggggtaaggatgctcaaacgacagcgaggcggtcaggccgaagcccagatgctccgtcaccagcgccattggggtgatcagagccagcggatcgttgaccggaacctgcgtcgcctggcggatcgccgcatcgccgctgccgttcagcacgtcatagatccccagcacgtcggcgataaacagcccgtcgaacttgccgcgctccagcagccgcgccagatccacccagtactccagatctttatactgccaggagcgatcccggggatgcgcccacaggcccggcgactgatggccgacgcagttcatatcgaaagcgttaagacgaatttcacgttgtgatgacatagcaatctccatagcgcggcccgtcgccggggcgcacgcggcaaaatgaatcagggaaaagaaagagaggtattcagtacgcaggacatcgggagtcctgcgggatcccgagcgtgagtaacgcttgcgccgccacgtcagcggcatggtcggctacctgcggcaggcccatcagttcgccaaaacgcccgcgggcggccggaccggccaccagcaccggcagcgcctcaacgtgcggctcagccactgcccgggaacggctgtccacctccaggcccatgccgagggcatcggcgcgaatcaggccgcggcgggcgaggtcctgtaaaaatggctggctgtcggtcagggcgcggtgtgcgggtccggtggtcaggatcaggtgatcgacgctcagcgtctgcacgccgccgccgcgccgcgccagcgtcagacgcagcgtttcgccttcaccgcttatcgacagtagcctggccgcctgcacctgcagactgcccgtgcgctggcgcgcctccagcacctcggcgacctgcggcgccacgcggtagcggtggacatcccagtaatggcgcagatgacgcagaaaacgctggcgatcggcgacgctgagcgcctgccagatccgctgcccctgttgacgaaccgcatccagcaccacctgccagctcaggccctgctgcgccgcatacgcgacgtcgaggcggatctgacgcaggcgctgacgcagactgccctgctgatagtcgccaggccaggttgtccccgcgccgctcaggttgccgcgcgacagcaggccgtggcgcgaaaaggcgacgatactgccgcggtggcccagccggtccagcgtcacgaccgtatcggccatggttaatccggtgcccatcaccgccacccgggcgtgcggggcgatggcatcgagcgcgccgggctgccacgggttggcaatcagcgccggatgatgacgccaggcttcggcctgcggcggcagcgaaggcggtggatgactgatcgccagcaccagcagatcggccttaaactgcaggccgccgtcggtggtcaccgtcccctgatgaaaagcgagcgcccgatcgcgcaggtggcgaagccgtccgccgctggacgccgcggcgtcggcaaaacgctgcgccacatagcgaccaaactggccgcgctgagggtagacggaaccgtccgggcgcagcgcctgcacatcgacggcaaaggcaggctgatggcggtaccaatgatcgaaggcgccctcttcgtcgccggccagctgcatgcgagcggccggaacgttaatccggtgcgtcggctccgcagtggagtaggccaccccggccccgggggactggcgcggctccagcagcgtcacgcgcaccccgttcggcgccaggcgcagcagctcaatcgccaccgccgcgccgctaaagccgccgccgataatcacgatatgcggttctgcactcatcgctgccctcctccggtatgctgtctcatggtcgcgctccgggccatcagctggcgctgacctgacgcaccgggcgcttatcgccgccgatggtttcgccaaacggaccggtgttcacgctacgcgccttcgacgaggccccgttttccagcggcaacagaggcatcaccagctcagcaaagcggtgcgcttcttccagatgtgggtaaccggagaagataaagttgctgatgccgagcgcctgatattcgcggatgcgttccgctacctgctgcggattacctaccagcgcggtacccgcgccgccgcgcaccagtccgacgccggcccacagattgggcgcaatgcgcagattatcgcgcgatccctgatgcagggcgctcatccgcgcctggccggccgagtccatgcgggcgaagatcttttgcgcctgggcaatggtatcgtcgtcaagatgggcgatcagccggtcggcggcggcccatgcctcttcttccgtttcgcgcacaatgacgtgcagacgaatgccgtactgcaggatgcgtccgcgggccgcggcgcgctcgcgcaccaccgccagcttctccgccaccagttccgggggttcgccccacgtcagatagctgtcgatctgctcggccgccacatcaatggccgcatcagaagagccgccgaaatagagcggcgggccattctcctgcaccggcgggaacaacacctcagcgccttccacgtgaatatgctcgccgtgataatccactttttccccgcgcagcaggcgggtgtaaatatcaagaaattcgcgggtcacctgatagcgctcgctgtggctgaggaagataccgtcgcctttgttttccaccgggtcgccgccggtaacgacgttgatcagcagccgaccttccgataaacggtcgagggtggccgccatccgcgccgccagggttggcggctgcaggcccggtctgaccgccaccagatagcgcagacggcgggtcaacggcgccagcgccgaggccaccagccacgaatcttcacagcttttaccggtggggatcagcacgccgtagtagcccaggctgtcggctgccagcgccacctgctgcagataaggtaaatcgaccgggcgtccaccctcggtggtacccagataacggccatcgccgtgggtaggtaagaaccagaagacattgatcttgtcgggagcttgctgcgtcattatctatttcctatataaccatatccgatatttatcgaagagatgttttaatttggttatatgggtgttagcgataatcatgccaatggtgaataaaaaattaatcttttaaaatcaatgcactgaaaacggcttcgccgcgccgcgctgttgcaaatcgcgcagccgccgcgcatccgctggcgcatttgcaacagccgcgggccttccccctctggtttctgcggccgccgcaggataagttcagagcgtcaacgatcggaggcccgctatgctgaacccagaatccccttccaccgctcccgcgctgatcgacccggcgtcgaaggccttccagagcctgctggacaaactcgcgccaacggaggcgaccgtgctgatcgtgggcgaaaccggcaccggcaaggaggtggtggcccgctatctccatcatcacagcgcccgtcgccagcagccgtttctggccgttaactgcggcgcgctgaccgagagcctcgccgaagccgaactgttcggccatgagaaaggcgccttcaccggcgcgcagcagggacagcccggctggtttgaagccgcggaaggggggacgctgctgctggacgagatcggcgaattaagcctgccgctgcaggtcaagctgctgcgagtgctgcaggagcgtgaaattacccgcgtcggctcacgcaaagcgattaaagtgaatgtccgggtgattgccgccacccacgttgacctggcccaggcgatccgcgagcgccgctttcgcgaggatctctactatcgactgaatatcgcggtggtgccgctgccgccgctgcgccagcgtcggcaggatatcccgctgctggcgcaccactttttatcactctacgcccggcgcctcgggcggccaaccctgcatctggcgccggaatcactggcccggctgatggactattcgtggccgggcaatattcgcgagctggaaaacaccctgcacaacgcggtgctgctcagtaaagaagaggagatcagtcctgcccagctgcgcctggcgacgctcaacgacgccccggggccggcgagcgatcatgaactggacgactttattcgccaccagctggcgcttcccggcgagccgctgtggcagcgagtgaccagcgccctgattcgccacgccatggcacattgcgacgataaccagagccaggcggccgcgctgttggggatcagccggcataccttgcgcacccagctcgctaacctcgggctgatcaaaagccgccgccgcccgcctgcgccgccgcgggcgttcgccaacgcagccggggccgatcgcgaactgcgcattggctaccagcgcttcggcagcctcgggatcctgaaagcccgtcagagcctggaaaccgccttcgccagcctcggcgtcaacgtgctgtggagtgagtttcctgccggaccgcagctcctccacgccctcgcctgcaacgagatcgacttcggcaccaccggagaagcgccgccggtgtttgcccaggccagcaatagcgaactgatgtacgtggcgtgggagccgccggcgccgcgcagcgtggcgatggtcgtcccgcaggggagcgacattcgccagctcagcgatctgcgcggtaaacgcatcgccctcaataaagggtcgaatgtccactggctgctgctgcagatcctcgaggacgccggcctgggtctgaacgatgtgcgggtggtctataccccgccgaaatatccgctgaccgccagcgactatctggcggttgacgcctggatgatgtgggatccgctgctcagcgacgccgaacacaccggcgagctgcgggtggtcgccagcggcgaaggacgggtcaacaaccatcagttttatctctcgcgacgggactatctcgctcagcacggcgatatcatgcgccgcctgctgacggagctgacccacaccgggcagtttatcgactcgcatcgtggcgaagcggcccgcttactctcggcagagctggggattgacgcccggtcgctgcgcatcgccctcgcccgccgaagccaccgcccaaggccgatggatctgtcagtgatccgcgcccagcagaccatcgccgatcgcttttacgccctcgggcttatcaccaaaccggtcccggtgcgcgaagcggtgtggtacggcgagcccgcgcccggcgtcgccagctcgctgatggcggtcagttagcgaaaattgcgcgttatcttcctgattgttcaggcgcagatagcctcgatctgatggcgatgttaccctaaagacgctgagaataagggggtatctgtggctgttcatctgttaatcgtcgacgcgttaaatctgatccgccgcatccacgcggtgcagggttcaccctgcgtcgatacctgcctgcatgccctggagcagctgatcgtccacagtcagcccacccacgcggtggcggtgttcgatgatgaggatcgcgcccacggctggcgccaccagcgcctgccggagtacaaagccggccgcgcgccgatgccggagacgctggtggccgagatgccggcgctgcgggccgccttcgaacagcgggggatccgctgctgggcctcgccgggcagcgaagcagacgatctcgccgccaccctggcggtgaaggtggcccaggcgggccatcaggccaccatcgtctccaccgacaaaggctactgccagctgctgtcgcccaccatccgcatccgcgactactttcagaagcgctggctggacgcccccttcatcgccagcgagttcggcgtcaccccggagcagctggcggattactgggggctggcggggatcagcagctcgaaggtgccgggcgtggcgggcattggacccaaaagcgccgcccagctgctgaacgagtttcaggacctggaggggctgtacgcccgtctggccgaggtcccggagaagtggcgcaaaaagctggccgcgcatcaggagatggccttcacctgccgggaggtggcccgcctgcagaccgacctccagctggacggcaatctgcagcagctgcggctgacgcgctgaccatcgttaagaggtgcgccggtgcagggtaactgcctgctttacccgggacaggcaatcaccaggccgcctgatataacccgacgatatccgccaggctcgcctcgcgcgggttgccgccggtacacacatccgccagcgccgcctgggccagcgccggaatatcctctttcctgacgcccacctcgcgcagatggccgggaataacgacatcgcggttaagctggcagaccgcctctactgccgcctcgcgcgcggcggtcaggcttaacgcttccaccctgacgcccatcgcccgggcgatgtcgcgatatttttccccggtcgcctcagcattaaagcgcatcacgtgcggcagcaggatggcattcgccacgccgtgcggcgtgttgtaaaaagcgccgagcggatgcgccatgccgtgcaccagcccgagcccgacgttggaaaatcccatccccgccacatactggccgagcgccatagcttcccccgcgcctgcgtcgccggcaaccgagccgcgcagcgcgccggcgatgatctcgatggccttgaggtgcagagcatcggtcaaagcccaggcgccgcgagtgaggtacccttcgatagcatgcgtcagggcgtccacgccggtagccgccttcagcgccggcggcatagcgtccatcatatcggcatcgataaaggccacctgcggaatatcgtgcgggtcgacacagacgaatttgcgccgctgttcttcatcagtgatgacatagttaatcgtcacctccgccgcggtacccgcggtggtcggcaccgcgaagatcggcacgctgggctgacgggtgggcgacagcccctcgaggctacggacatcagcgaattccgggttacgctgaataataccgatcgccttacaggtatcctgcggcgaaccgccgccgatggcgatcaggtaatccgccccgctgcgttgaaaggcctgcagcccctgctggaccacggcgatggtcgggttagggatcacgtcgctgaacatatcccatgccagcccggcggcatccagtttgtcggtgactttcgccgccacgccgcagcgggcgagagtgctgtcggtgacgatcaatgctttacgatagccgcgccgcaccgcttcatcggttaatgcgtttatcgccccccggccaaaccatgccgtttcattgaggatcattctgtttgccatcgtggctctcctgttagcgttgcggcatcactcttcaatgcgtaatccgtaggttttgaacttctccagcacgatggcgatcgcctcgtcatccagcaccgggaccgggtcggtaatcgccagcgtactgaggtagagctgggccaggacctccacttcatgcgccagccagagcgctttctccaggctggcctcgcaggcgatcaggccgtgatgctgcagcagcgtggctttgcggtgcttcagcgccaccgcgacatgctcagacagttcgcgggtgccgaaggtggcatagggcgcgcaggggatcgaattcccgccggccgcggcgatcatatagtggatggccgggatgggccggttgaggatcgacaccgccgtacaatggacagcgtgattgtggaccaccgcctgggcatcgggtcgcgtctggtaggccgcctgatgaaaacgccattcgctggagggcagttttccctgctcatgctggccgtcggcatcaataaagacgatcttgtcttccgtcagcttttcatatgggataccggtaggggtgatcagcattcctccctgatagcgcacgctgacattgccggcggtcccctgatttaaccccaggcgggtcatttccaggcaggtatcgataatctgccgggccagtctgtttctttccattgcgttcctcttttggtgactcatcatccatcaacggcagggcaacagaaatatcgtcggctaccgtgggatagggtgaataatggtcttcatcatcaacctgaatattcaaaggggaattttcatgattattttttgtgagccgcgtcaattattccgccatgaataaagcaaccatacccattacgagagagattaaaatgcccgttcttaataatatttcatcaagcgggcattttatttctttgtaacatttgcccgttttccacgatatatattcattcggtcattagcgttgtggttttgtgaatttattttctcaaacggtcagcgtttttgaaaaattaaagtgacaataatcacataaaatggcccacagtacgttaagtgtgaccatcatcatattaacagacggtttttatttgaaaatgaagccatgagttccgccgtgactttcatttcactcaccggcgcgtcacctgagctcacttaattttgcagtctgctgcagcaccagactgcgccctgaatgctgttgtaaatgcttctgaactgatgaggacgctatgggaaacacaacgataccaacgcaaagttaccgcgccatggagagcgggcagagtaagagctacattattcctttcgctctgctgtgctccctcttttttctgtgggcggtggctaataatctgaatgatattttattgccgcaatttcaacaggcctttaccctgactaacttccaggccggattaattcaatcggccttttactttggctattttattattcccatccccgccgggatgttgatgaaaaaattcagctacaaagccggcatccttacgggtctgtttttatatgcctgcggcgccgcgctgttctggcctgccgccgaagtgatgaattacaccttatttctcattggattatttattatcgctgccgggcttggctgtctggaaaccgcggccaacccgtttgtcaccgtcctcggtccggaaagcggcggtcacttccgccttaatctggcccagacctttaactcattcggcgccattattgccgtggtatttggccagagtcttattttgtctaacgtcccgcatcagccgcaggaggtgctggataaaatgacgccggaacagctcagcgcctggaagcacagtctggtcctgtcggtacaaaccccctatatgattatcgtggccattgtcctgctggtcgccctgctgatcgtctgcacccgcttcccctccctgcaaagcgatgaccacagcgacagcgcgcagagcacttttttcgcctcgctgacgcgcctgatgcgcatccgccactggcgctgggcggtactggcccagttctgctacgtcggcgcgcaaaccgcctgctggagctacctgattcgctacgctatcgaagagatcccgggcatgacggccggtttcgccgccaactacctgaccgccaccatggtctgcttctttatcggccgttttaccggcacctggcttatccgccgcttcgcgccgcacaacgtgctcgctatctatgcgtttatcgccatgctgctctgtttgctctccgccttcagcggcggccacgtcggtctgctggccctgaccctgtgcagcgcctttatgtccattcagtacccgaccatcttctcgctggggattaagcatctgggccaggacaccaaatatggctcgtcatttatcgtcatgaccattatcggcggcgggatcgttaccccggtgatgggctttgtcagcgacgccgccggcaatatcccgaccgccgaactggtcccggcgctgtgcttcgccatcatctttatttttgcccgtttccgttcacaagcggcgacgaactaaacctgttatccgcataacctgagggatctgtaatgaaaaaaatcagcttaccgaagatcggtattcgtccggtaatcgatggtcgtcgcatgggggtccgcgagtcgctggaagcgcaaaccatgaacatggcgaaagccaccgccgcgcttatcagcgagaaactgcgccacgcctgcggcgcccgggtggagtgcgtgattgccgatacctgcatcgccggcatggccgagtcggccgcctgtgaagagaaattcagcagccagaacgtcggcgtcaccatcaccgtcaccccctgctggtgctacggcagcgaaaccatcgacatggatccgctgcgcccgaaggccatctggggctttaacggcaccgagcgtccgggggcggtctatctggccgcggcgctggcggcccatagccagaaagggatcccggcgttctccatctacggacatgacgtgcaggatgccgatgacacctcgatcccagcggatgtcgaagaaaagctgttgcgcttcgctcgcgccggcctggctgtcgccagtatgaaagggaaaagctatctgtcgctgggcggcgtctcaatgggcatcgccggatctatcgtcgaccacaacttttttgagtcctggctcggcatgaaggtgcaggctgtcgacatgacggagctgcgccggcgaatcgatcaaaaaatctatgatgaaaccgagctggagatggcgctggcgtgggcggataaacacttccgctacggcgaagatcagaacgctgagcagtataagcgcaatgaaacgcagagccgcgcggtgctgaaagagagcctgctgatggcgatgtgcatccgcgacatgatgcagggcaacccgaagctcgcagaaaaagggctggtggaggagtcgctgggttacaacgccatcgccgccggtttccagggtcagcgccactggaccgatcaataccccaatggcgataccgccgaagcgctgctcaacagctcttttgactggaacggggtgcgcgaaccgtttgtcgtcgctaccgaaaacgacagcctcaacggcgtggccatgctgatgggccatcagctcaccggcaccgcccaggtgtttgccgacgtacgcacctactggtcgccggatgccgttgaacgggtcaccgggcagccgctcaccgggcgggcggagcacggcatcattcacctgattaactccggctctgcggcgctggacggctcctgccagcagcgcgacgcgcagggcaatccgacgatgaaaccccactgggagattgagcagagcgaggcggatgcctgcctcgcggcgaccgaatggtgcccggcgatccacgaatacttccgcggcggcggcttctcttcccgcttcctgaccgaaggcggcgtgccgttcaccatgacccgggtgaacatcatcaaaggtctggggccggtgctgcaaattgccgaaggctggagcgtggcgctgcccaaagcgatgcacgaccagctcgacgcccgcaccaactccacctggcccaccacctggtttgccccacgcctgaccggcaagggcccgttcagcgatgtgtactcggtgatggccaactggggcgccaaccacggcgtgctgaccatcggccacgttggcgcagatttcattaccctcgccgccatgctgcgcattccggtctgcatgcacaacgtggaagaggcgaaaatctatcgcccttccgcctgggccgcgcacggcatggatatcgagggccaggactaccgcgcctgccagaactacgggccgctgtataagcgttaacaggttggtttcgcccggaggcgcaggcttacctggcctacagacgcgcgcggtctgtaggccggataagcgctgcgccatccggcaatgttgtttcgggagtcactatgaggcaagacgttatcctggtcctcgactgcggcgccacgaacgtgcgggcgatggccgtggatcgacaagggaaaattatcgcccgcgccgcaacggcgaacgccagcgacatcgcggcggaaaaaagcgactggcaccagtggtcgctggaggccattatgcagcgctttgccgactgctgtcggcagatccatgaccagctggcctcctgcacggtgcgcggcatcaccgtcacgacctttggcgtcgatggcgcgttggtggatgagcagggcgccctgctgtatccgatcatcagctggaaatgcccgcgcaccgcggcggtgatggagaatatcagccagtatatgctcgcgcgccagctgcagcagatagccggcgtcggcgcgtttgcgttcaacaccctgtataagctggtgtggctgaaagagaaccacccgcagctgctggcgcaggcccatgcctggctgtttatttcatcgctgatcaaccatcggctgaccggggagttcaccaccgacctcaccatggcgggcaccagccagatgctcgatctccggcagcgcgatttcagcgcgccgatcctgcaggcgaccggcctgccgcgccgcctgttcccgcggctggttgaagcaggccagccgatcggcgccctgctgccggaggccgctgcgctgctgggccttcccgtcgggatcccggttatctcggccgggcatgacacccagttcgctctgtttggcgccggcgccgggcaggatgagccggtgctctcctccgggacctgggagatcctgatggtgcgcagcgcgcaggtcgacacctcgctgctctgtgactacagcggctccacctgcgagctggacagccagccgggccgctataacccggggatgcagtggctggcctccggcgtgctcgagtgggtgcgcaaactgctgtatagcgctgacaccccatggcagacgctgattgacgaagcgcaggcgatcccgcccggcgcccagggcgtcaggatgcagtgcgacctgctcgccagccagcacgccggctggcagggcgtcacgctcaacaccacccgcggccatttttaccgcgccgcgctggaggggttaagcgatcagctggcgcagcatctgcaaaccctggaaaaaatcggcggcttcagggcgaaagagctgctgctggtgggcggcggcagccgcaacgcgctatggaaccagatcaaggccaaccgactcgggataccgatcaaagtcctcgacgatgccgaaaccaccgtggccggcgcggcgatgtttggctggtatggcgtgggcgagttctcttcgccagaacaggccagagcgcaggtcgcgtaccgctaccgctatttctggccgcaaactgaacctgaactgatagaggaagcctgagatgctcaaaaccatttccccgctgatatcgccggaactgctgaaagtgctggccgaaatgggccatggggatgaaatcattttttccgatgcccatttcccggcgcacagcatggggccgcaggtgatccgcgccgatggcctgcgagtcagcgatctgctgcaggcgattatcccgctgttcgaattagacagctatgcgccgccggtggtgatgatggccgccgtcgaaggcgatgcgctcgacccgacggtggaacagcgctatcggcaggcgctatcgacgcaggccccctgcccggatatcgtgcggattgaccgctttgccttctacgaccgggcgcaaaaagcctttgcgatcgttatcacaggagagtgcgctaagtacggaaatatccttttaaaaaaaggagtcacgccgtaatctcatgccggagcgtctgcctgatgcagacgctcaatcaatgatgggatgagaataaatgaaagcagcccgccagcaggcgatcgtcgatctcctgatcacccacagcagcctgaccaccgaaacgttgtcaaaacagctcaacgtcagcagggaaactattcgccgcgatctgagcgagctgcaggcgcagggcaaagtgctgcgtaaccacggccgggccaaagtgatccaccagcgcagccaggacagcggcgatcctttccacatgcgcctgaaaagccattacgcgcataaagccgacatcgcccgcgaagcgctggcctggattgacgaagggatggtgatcgccctcgatgccagctccacctgctggtatctcgcccgccagctgccggaccgcccgctgcacgtctttaccaacagccagcccatctgccaggagctggccaaacgcgaccagatcacgctcacctgctccggcggcactctgcagcggaaatatggctgctacgtgaacccggcgctgatttcccagctgaaatcgctggagatcgatctgtttattttttcctgcgaaggcatcgacccgcagggcgcgctgtgggactccaatgcgttcaatgccgacttcaaatcgatcctgcttaagcgggcggcgcagtcgctgctgctgatcgacaaaagcaagttcaaccgctccggcgaggcgaggattggtcatctggatgacgtgacgcatattgtgtcggatgcgccgcagccttaaggggaaggccggaggacgcgcacgcgtctccggcctgagggggaaggattaacgctcgtcgcgacgtccgccgacggcggcccacaggcggcgcacgtgaacggtcacttcttcacgatcgtgatacagctgacgcgcctggatctgggcgttaacgccgtgctcgtccagctgggcctgaatataggccagattctgcgacacctcttcatagcgctttttcatcggcagcttgaggttgaagatggtctcccggcaccagccgttgaccagccactgcgccatcagcgccgccaccttcgccggtttctccaccatatcgcagaccatccacgagatgttgttgcggttcggacgatagcggaaaccgtcttcgcgcagccaggtcacctggccggtatccatcaggctctgggccatcgggccgttatcgaccgaagagacccacatgttgcgcttcaccagctgataggtccagccgcccgggcaggcgccgagatcgacggcatacatgccgttcgccagacgctcgtcccactcgtccgccggaataaagacgtggaacgcctcttccagcttgagggtggaacggctcggggcgtcggagggaaacttcagccgcggaatgcccatatagaacggtgagttgttgttgctgtatgagtagccggtatagcagcagccgggtgcgataaagaacacatgcaccaccggtcgctttggcgtttcatagttggtcagcacgcccgcctcgcgcagcgccgcgcgtaacggcaccgtaaacttgcggcagaacttcatcagctctttgctttcgttggtatccgccacttccacacgcagctcgccacccttctccaccatgccctgcagcatgccgacgatcggggttatgcgatcctccggcggcaggtcgcgcagcagttcgccgaccacaaacatctgacgggcaaaaatcagcgagctgaacggcagatcgcgcaccagcttctcgccgtcgtcctgctgataaccttcaaaaattacatagccagagtcttctttgacccgggcaaaaccaaacacctcaaggcgggctgccttatcggtaatttctgctgcgcactctttctcaaacccagggcgacaatagaggacaaccttattcatgaacaacgcccttacgtttcagacgaattgcaccaattaacattaaaacccaaccggcgaggaagcttacgccgcccaccggggtcacgaacgcccacagacgtaaatgagagagcgccagacaatagaggctgccgctgaacagcacggtccctaacgccagaaacacgctgctccagtagaaccagatgctgatccgacgctgcatcgccaccgccagaccaaaaatcgccagggtatggaaggcctgatattccaggccggtatggatccaggccatctccgccgcgccaagcgattgacttaatacatgcgcgccaaaagcgcccagagccacaaagataaagccgctaatcgcggcgaatatcagcataaaacggctggtcatgttgttaccctacaagtaattattgttcataacgaaagcggaatttttcttgttcacttgccgctttcgccaagatccactgccggaaagcggctattttacccagttctgcctgactgtcatggcaaacaaggtaaaacgcattcttactgaccagaacatcattaaacggacacaccagacgaccggcttcaatttcggactgcgccatgacattgttggccagcgccacgccctgcccgtgaatggccgcctgcagcaccatcgcgctatggctgaaaatcggcccctgctgcacattaatatggcttagaccaagctgacgggtataagtttgccagtcgcggcgggacgcatcgtgaagcagggtatgttgcgccagatcggcaggcgttttcaatgctttgtcgccggtgagcaagagcggggaacagaccggcagcagatactcggcgtacaatttttccacacgcaggcccggccagttgccgcgaccataaaaaatcgccacatcgacatcgtccgccagcttatcctcctgacggtccaccgcctggatcctgacgtcgattcccggataagctgagttaaagcttgtgagtcttggcaccagccactgaatggcgaaacttggcaataaactgaccgttaatgcccctttggcgctgcgcgcctgcagtttacgcgtcgcttccgtcagttgcgaaaaaatctctttaatatcctgaaaatagctctgcccttcttccgttaacagcagcgaacgattgcgccgacggaacagcttaaggcccagaaaatcctcgagagacttgatttgatggctgactgcggcctgcgtcacaaaaagctcatcggctgcccgagtgaagctgagatgacgtgcggctgcatcaaaaacacgtaatgcattcagaggtggtaatcgcttcgacatggttattctggcttagatgttaactcaatttaacaaataggaaacaatgattaacctattagttttttttatctgagccattataaattgtccgttgaggttctaccagcaaatacctatagtggcggcacttcctgagccggaacgagaagctttttttggaatgcgtgttccatcaagcttttggcttacggttgtgatgttgtgttgttgtgtttgcaattggtctgtttttgcagaccctggtagcaaagctaccccttttcacttcctgtacatttaccctgtctgtccatagtgatttaatgtagcaccgcaacgcgcggtgcttttttttgcctttttactgccttactcgtccagttcacccagttgtttcacgtcagagcgattgatctgctgtttgttgccccacgcgtctttatacgagatcatgccagtgtcattatcggtttgcggtttcccgtcggtaacgatggtccgcccatcgttggtatgcatcacatagttagaggaacaggcgctcaggcctaaagtcagcatacaggcagagataatcgcagcggccttagtcattttcattcttctctccttacggctatttatactattcgtaactcgttaagtaataggttaaaacacaaacccaacacttttcagcataaccctctttgaccgacgtggagtcacattcggacaattccacaggacgcagagaccttgtcacgcccggcaaattgcgcgacgatcgcggcattgatacgaggaattccatgaacgcattcaacccggcgcactttcgcgcgcagtttccggctctggccgatgccggcgtctatctcgacagcgcggcgacagcgctcaaaccgctggcggtgatcgacgccagcgaccagttttatcgcctgagcgccggcaatgtccatcgcagccagttcgccgccgcccagcggctgaccgagcgctacgaggcggcccgcgatcgcgtggcggcgtggcttaacgccccgtccggcaaagatatcgtctggacgcgagggaccaccgaggccatcaatatggtggcgcagagctacgtccggccgcgcctgcagcctggcgatgaaattatcgttagcgaagccgagcatcatgccaacctcgtgccctggctgatggtggccgggcagaccggcgccagagtggtcaaactgccgcttggcgccgaccgtctgccggatatcgccagcctcagcgcgctgattaccccgcgcagccgggtgctggccatcggccagatgtccaacgtcaccggcggctgcccggacctggcccaggctatccgccttgctcacgccgccgggatggtggtgatggtcgatggcgcccagggagcggtgcatttccccgctgacgtgcaggcgctggatatcgatttttacgccttttccggccataagctgtatggcccgaccgggatcggcgccctgtacggcaaaagcgagctgctggcagcgatgtcgccctggctcggcggcgggaaaatgatcgccgaggtcagctttgacggctttacgccgcagccggccccctatggcctcgaggccggtacgccgaatgtctccggggttatcggcctcagcgccgcgctggagtggctggcgcagagcgatatcggccaggcggaaaactggagccgcagtctggcgagcctggcggaagaggaactggcgaaacggccgggcttccgctctttccgctgccagcagtcaagcctgctggcctttgaatttgagggtattcatcacagcgatctggtgacgctgctggcggagtccggcattgccctgcgcgccggacaacactgcgcccagccgctgctggcggccttaggggtcagcggcaccctgcgggcctctttcgccccctacaatacccaagacgatgttgcggcgctggtgcacgcggtggatcgcgccctggaaattctggtggattaatgacaactctgcaccccttcggcacaaccattaccgacgctacgctgcgccagatcttcgccccgctgaaccagtgggaggataaataccgtcagctgattttattgggcaaaaagctgccgacgctgaccgacgagcgcaaagcgcaggcccatgagattgccggctgtgagaaccgcgtctggctgggctatgaggaggacgccgagggcaggctgcacttctttggcgacagcgaaggaaggattgtgcgcggtctgctggcggtacttttaaccgccgtggaaggaaaaacccgcgccgggatcctggcgcaggatccgctggcgctgttcgacgagctgggactgcgcggccagctcagcgcctcgcgcagccagggcctcagcgccctgagcgaggcggtgctcgccgccgcccgcgaaaggtaatctcccgatttcgctttcccgccgccgcgcccggtggggaaactactttccggaagccgcagcgtcacgctgcgctttcgccagcatcttcttcagggcatgcgacaccgcgacgaagccaaaggtcgcggtcaccatcgtcgccgcgccaaagccggaagcgcagtccatccgcttcggcccttccgccgtgctcttcattgcgcagacgctgccgtccgcctgcgggtagaccagcgcttccgtagagaagacgcagtctacaccgagcttacctttgctgtttttcaccaccccaaactggcttttcagccgctctcgcagtttggccgccagcggatcctggatggtcttcgccaggtccgcgacctggatctgcgttgggtcaatctgaccacccgccccgccggtagtcaccagcggcaccttgtagcggcgacaccaggcgataagcgccgctttcggccggacgctatcgatggcgtcgataacatagctaaagccgacgccaagatattccgccacgttttccggggtcacgaaatcatccaccaccgtcacccgacactccgggttgatcaggcgaatacgctccgccatcacctccgctttcgccagcccgacgttgccgctgagggcgtggatctgacgattggtgttggtgacgcagacatcgtccatatcgataagggtgatcgccccgatgccggtccgcgccagcgcttccgccgcccaggagccgaccccgccgatcccgaccacgcagacgtgggcgtcggcaaaacattgcagcgctttttcaccatataaacgtgccgtaccgccaaaacgctggcgccaggcatcgctgattacaacagacatagaacctcagaacaaaatgacagcgcccggaggccgccgcaagcggcgtcatccgggcgccctggtcaacaggcacggccaggggagttagccgctaaaaacattccccgcgcccggggcgtttttcagcacccatacgcggccgtagtggttataccagccggcacggtggcctgcgtcaggcccaatgccctgatagatgtcgaaatgctggcctttgatggccccgccgacgtcgagggcgaccatcaggcgcagttcgtactggccgttaaacttgccgttattatccagcagaggcacctcggccagcaaggtggttcctggcggaataatcgaccggtcggaggccaccgaggcgcggccgatcagcggcacagcgctggcccctttcaccggcgcgaaagactgcggtttaaagaacacgaacgacgggttctgctccagcagctcgcgcacttccgcttcgctgtgcttctcaccccactcgcggatcgcctgcatcgacatatcttctttcttcacttccccgcggtcgatcagcactttgccgatgctgcgatagggccagccgtttttcccggcatagctaaagaagttgagcggcgaaccatcgccaaagtcgatatagccgctgccctgcacgtccatgatgaagttatccatcaacgagttgctgtacgccagcacatagttatcgctcagcgcgccggcatagatgctggcgcgggacggcagcttaccgcgctttggcggcatacggtaaatggggtactggaattcgccctgacgggtgtggcgcgcctgcaccaccggcgtgtagtagccggtaaactggacgttgccataattgtcgacgccctgcatctgccaggcgtcgatgccaaactggcgcagcgtacgggtgtcgccgccggcgcgcagccactcctgcagcgcgttatagacgttgctctggctattatagaggcgtggcgaggcgttacgaatttgattaacctgctcggagaagtcgccggcgttgatcggcgccccgacggcatccggctggtttaccagtgaaaacggctgggtgaacttgccatcgctatattgctgaccgcggtcggtcggttttgaggaacaggcggcgagcatggccagcattgcccccgtcgctacatattttgcccaacgtcctttcatggtgtctcatcttttgctgcgaagccttagtgcgtgttgaagataacaaagcgccggagctattgaaatgcgcgatctcatcgatggcacagatttgtgtaaaaaaacaccacaacatggcgttttataagccaattcttacaaaaatgtcgatttggtcgaaaaaaggttgcatcatctcgctagcggagtatagtgcgcttccacggacgcggggtggagcagcctggtagctcgtcgggctcataacccgaaggtcgtcggttcaaatccggcccccgcaaccaattaaaatttgatgaagtaaagcagtacggtgacgcggggtggagcagcctggtagctcgtcgggctcataacccgaaggtcgtcggttcaaatccggcccccgcaaccaatcaaatttgacaaagtgaagcagtacggtgacgcggggtggagcagcctggtagctcgtcgggctcataacccgaaggtcgtcggttcaaatccggcccccgcaaccaacattacaaacaccctcaagggtgtttttttgtttctgccgccagcaaaacctctgccgaaaacgggaacggccattgccgccccctcgccggtttgctttatgtcatccgtaacagcccctgaaatacaagaaaccgcaatttatcaacgtctttttatacttccctgtatctctcaggagatccacagatgatgcgtggacaaatgagtgtacggctaaaagccacttacttaatccactcatttagagttttgcgcaataaaaggactaaattcccggaactaccgttatctttacgtttgtaatcggcccctggccaacaagaatgaagatagcagacttggtataatcattatatttcggtgcttatcttgccagacagggcactgcaacaaacaggatttaattgagataatgtatctatgatagttttcattataagtcagcaccatactttcattactgaataaatcatgataattgatgcaaatgttatatttttgataccagagcttcttctgattgttttaaattatggtattaattccatcctttccccttctgtacttcactaatctcgcagtagatggtcgaactttttgccaccaaatcattcacagcaaaaatatcatttattaaagaagcttttatttattccgaaaaagtggcgttgcgatattattacgcgatcgtttatcggtattttatgcttatacttagccataaccaagcagattgcccttgatggtcaataaattgagaaacttcatataaataaaactatcttaggatacgagccaaattatttatagtagtaataaaaacgatctttcagacactgaccacattgcaccacgctttatttaactgttaaattggatcaaggtcagatacttaaacaagggttagttagacagggagaagcaacatggctaaaaaatttctaaacgatgttcccgaaactcgctttaacataaagccgggcctgaaaacaggaagtgccatgaatgtgaagttacctctacatcttctctccgccagggattgtagtgtccaccagacatttattaactatagccccagtaattggccttaatttaaaccaaaacaacttcactaacgccatgactgaacctggagcgatggaagaattaacaagaatgtcgttacaggagaggggttaacctgcacgcctgggaaagtcattgggcaaaaccggataaaagtttcaaaagggaaattttgatgtctgcaaaggaacatatttcttcatctgcggctatgtcaacaatgatgggatcaggcggcatttatcagtcgttgtttaaaaaaatacatctgacggtagctatccatactccactttcctgtctggcgaaatctgcggaggatgtggttatgcatcagccagacgtccagcacgttaagtcacgctggcacggtctcaggtttctcaaatgccaaaagcaaaaacctgaccgggcggtggtgtagtatgaaaattcatcgaccactatgggctgagggaacgttcctgtcctcacaacagtttcagcagcaggcccgctgggaaacgtacagtaacaacagcattgcacagctgggtatccgtcatccatggggtgtggcgagagtcgagtttgacagagaagcgttggcgttagggaagttaaaattacgtaccctgcgcctgcgtttttccgatggctcgttgatcgactccgaagtttccgatgcgctgcctctggcttgtgatttacatactctggcggtggaaaatacggcaatagttgtcctggcgttaccgctggaacatgcgaatggcggtaatctgggacaggaaaagcatactgaaagacccctgcgttatcgtcaggaatggcataaagtacaggatatttatggcagcgacagtgaagaaatggccgttgaatgccatgcgctgtcattgcgtttcgcccatgataacaatcaggattacatcacctgcccgcttgcacgtctgacgcggaatggtcagggtaactggtctcaggatgaaagctacatcccgccgctgcttgccctcagcgcacatattggtctggtggagcgactggatacgttgctgttgcagctacaagcgaagtgccggcgtctgatggccctgcgccgggaaagcaatcagcgtatggcggacttcgcggtagcggatgtgtccctgttctggttactcaatgcgttgaacagcgctgaaccggttctaagtgattttttacggtatccgagcatccatcctgaactcgtctggcgcgaactggctcgtctggccggcgcgttgctgaccttttcccttgaacacaacgtgagcgccattcccgcatatgtccatgatgctccagcctccgtttttccgccgctttttaccctgctcagcgaactgctcgaagccagcctgccgtcgcgggtgattgcgctcgagctggaatcccttcccggcaaccgctggaaagccgaacttcacgatccacgcctgcgggaagaggcggatttttacctttctgttcgctcctcgctgccgacgcacgtcgttctgcaacagttaccacggctctgcaaaatcggggcgccggatgacgttacgttgttggttaatgttgcgctgaacggtgtccctgttgttccgctgacgcaggttccggctgcattgccattacggctggagaatcagtactttgcgctggatatgcagagcgctccggctaaagccatgctggatgccgggtgctgcatgatttacgcgccgggtacgctgggcgatctgaaacccgagctttttgcggtactgcggtcatgacacaggaacggaaaatcgacattgacgtactacttcgcgacacctttctgacggtggtggaactgcgtcagggcacttctgcaagacacggacaggaactatatcgccattgtctgcagcaggtggaaggggtacgcgagcgtctgacagcggccggattcagccagcaggacatagaacatatcacttacgctcagtgcgcgctgctggacgaaaccgttctcagccgggacgggatggatgatggccagatggtctggctaaaaaaccctctccagtcgcattttttcaatacccttcaggcgggcgaactactgtatgagcgtatgaagcggtttttacaggagccagcccccacgccggcggtcctgacctgttttcatcgcgtgctgttgctggggtttcgcgggcgctatcaggaccccgaatctgatgaacggcagcatctcattgcgatgttcagcaagagggttgagccattcagggtgcaagaagattcggcagtgctgaacgtgcctttgaccaggcgtcagcattacctgtggcagtctcctttttgctggctgctactgctaatgcttgtgctggttggcgtctggtgggggttgcatagctggctgaatgtactggtggatgaactgctgccaacaggcaagtcttgaagatgagccgggtgagtaacacgctgaaacaggcgcttttgctgtggagcatgctgctggtgctggcgctatggctgggattcaatcaggcctctacggcgatgaaatttggcgtgacagtggctcttatcatcatcgcagtaggcctgctggcgtgctggcgcggaaaaaaaagacagactgaggccgacagcgcatggctgtcccgattgccgcccaaaacatatcggcagcccgtagtgctggtgtgcggcgacgcggcagcatcgttattcacagaaaacccgctgcggcaggtcgcgggagggctgtacctgcacgttgcggatgaagagcaacttatcagacaggctgaagtgctgctggctgaccgccccgcatgggcttctcagttatgtgtggcctgcacggtcgtgccggttgttcatctggatatggctgttctggcgggacgattgcgacgctttgtcggcggtctggcgacagtgcgccgcagggcgggcataaaagtgccgctgctgctgtggagctggctgcccggcacagggcgagaggatgatctaccgtggtttatcttcgccggcggcaaggttcaggtggtgacgcccgccggagaaagctctccgacggcatgggcggcacagcccggaaccgatgggagcagcctgcggctttgccatcttctgcggatggaaagcctgatgcagtggctcaatcagatggtgttaccagagctgaacgggtatccgccgctggcggcgggcatggggcaggcgccatcgctgcctgcgctggaaggcaatctgtggcagacatggacaacggcaaaaacgggactgacgccggaggcgataccgaagatcggcgcatctcccctgccgttcccggacatgatgctgccgctgttaccacgtcaatcaggatttacgccagtgcgccgcgcctgcgtggcggcgctgctgatgaccaccgtggcaggagtggctgcgctctgtctgtcagcaaccgcaaaccgcagcctgctgctgcaggtgagcgacgatctacataaatatgatgccgttccggcagacaacgacgccgctaaagcccaccacctgtcggtcctgaaggacgatgcaaatattctggatagctattttcgcgaaggggagccattacgtctcagtctgggcttatatcccggcgaacggctacgccagccggtatggcgggttattcgcgattaccgtccacctgagaaaaaaagggatgtagcagacgcattaccggtacagagcgtgcgtctcgacagcatggcgttgtttgacgtcggacaggcccgtctgaaagacggctcgacaaaagtgctgattaacgcgctggtaaatatcagggcaaggccgggctggctgattgtggtcaccggatataccgatactaccggcaataaaaaagccaatcagcaattgtcgctgcgacgcgcggaagccgtgcgcgactggatgctacagaccagcgacattccggccaccttttttgccgtacaggggctgggcgaaagccatcctgcggcaactaacgatacgccggaaggcagggccgctaaccggcgcgtcgaaatcagtctggttccccgcactgacgcctgtcaggacgtgaaacagaacatgctgccagaaccggcgttatctcagttaaatccacaaggagtttcagccatctaaccatggctggcaggaagccttctgcttttttggcacgggttcgatatgcggctcgctgaatatcggtggtaccggtaccgagcaaccgctattcacaatttagcctgatgtaaacctgatgggcacgaggtcatggctatgggcggtagcgtgcctgaacagggccccgcaagaggaaattctgtggaatttgttacgaaataaggaagcccacgatggatgtacagaacttcgaccactcacaccacgcgttaaaaatccgcggcctgagcagcggcgtggacgtactgtcctttgaaggcaaggagcaattaagcgccccattccgctatgacattcagtttaccagcagcgataagtctattgcgccggagtcggtgctgatgcaggacggggcattcagcctgaccgccccgccggtgcaagggataccgacgcagactcccctgcgtacgttgtacggggtgatcaccggatttaagcaattgtcttcctcacgggacgaggcgcggtatgaggtgcggctggagccccgtctggcgctactgtcccgcagccatcagaacgcgatttatcagaaccagacggtgccgcaaatcgtggagaaaatactccgcgagcggcatgagatgcgcggtcaggactttgtgtttaacctgaaaggcgactacccgtcacgcgagcaggtcatgcagtacgacgaagacgatctgacattcatctcacggttgctgtcggaggtgggtatctggttccggttcagtaccgacgcccgactgaaaatcggggttatcgagttttacgacgaccagagtggctatgagcgcggcctgacgctgccgctgcgtcacccttcggggatgagcgacagcggaaccgaagcagtgtgggatctgaacacggcctacagcgtggtatcgaggtccgtcacgacgcgggattacaactaccgtgaagcgatggcggagatgacaacaggccagtttgacgtaacaggcggggataacaccacctacggtgaagcctatcattacgctgacaattttctgaaaacgggtgacaaagcgacgccggagagtggtgcattctatgcgcgtatccgccacgaacgctacctgaacggacgcgccatcctgaagggacagagcaccagttctctgctgatgccggggctggagataaaggtcgaggataatgatgcgccagaggtattccgcaagggcattctgataaccgggattaccgccagcgcagcacgagaccgcagttacgaactgacattcaccgccatcccctattccgaacgctacggctaccgccctcctctcatccgcaggcctgtgatggctgggacactcccggcgcgggtgaccagcaccacggcaaatgatgtctacgctcatatcgacaaagacgggcgctatcgagtgaacctggactttgaccgggatacgtggaagccgggtttcgagagcctgtgggtacggcagtcacgcccctatgcgggagatacttacggtctgcacctgccgctgctggcgggaaccgaggttagcatcgcgtttgaggatggcagaccggacaggccatatatcgccggggtgaaacacgactcggcgcacaccgaccatgtgaccatccagaactataagcgcaacgtgctgcgcaccccggcgaataacaaaatccggctggacgatgagcggggtaaggagcacatcaaggtcagcacagagtacggcggaaagagccagctgaacctgggacatctggtggatgctgggaagcagcaacgcggtgagggtttcgaactgcgcaccgatatgtggggtgcgataagagcgaaaaaaggtgtctttatcagcgccgatgcgcaggaaaaggcgcaggggcaggcgctggatatgcaggcagcaataacgcaactggaaaatgcgttatcgatagcaaaaagtctgtcacaggcggcggaggtggcgaaggcgcatggtgcggatcttgatgggcatacgtcgctgaacggcgcgctgtcggagcttgtaaaggcagggatagtgctgagcgcgccggaaggcgtggggattgtaagtccacagggcgtcagactgggttcgggagagagcagtatagggctgatggcgggaacaaatattgatgcaggggcgatggagaaggtgactgtctcggcgggagacgcggtgagtgtatttgcgcgcaagggagggataaagctgtacgcaaaccagggaaaagttgaagtggaggctcagaacgagagaatgcggctgacatcgcgccatgggatgaagataagcagtacggaagatgtggtggagatagaggcagagaaggaacttgtgctgaaatgcggcaaggcgtacatcaggctgagcggcggcggggtggaggtaggaggaccgaagaatatcctgttgaaatcagcgaatgtgcagaagatgagtaaagcgcagttgccggttgagatgcctgtgctgccgggaaaaggtaattacgatctgtcgctggatctgcgggactgggatggtattcccattggtggcgcgaagtacacaatcgcttttgagtcaggggctgtattgtcgggcatgttagatgataaagggtacgcactgcataccaatgttccccccgaatcagcaacggtggaatacgaatttccagagccggaaccggacaaaccttgggatccctattcgtccctgcttgcctcagtagatgctgaattagggacggatggacagggagcataataatggatacagacactgatttagacagagcgctggctttttatcagccgccaccagaaagctggtattctggcatacataagaaaattgaagcgaccgggcagtggatttgggaaaccattcagggggattttaacgataaccagagtaccgggcaggtagtaacaggtactgttatttctatgatccctctggtggatcagatttgcgatgtccgtgatctggttgctaactgcatgaaaataaaggaaggaaacgataaaaaaacagataccacttgggcatgggtggcaatgatcctcactctggttggtcttattccagttgcgggttccctgattaaagggattttcaaagtgctatttaattcgataagaaaagctgctcttgctgggaagataaccttaaaagctattgatgctgctgtctcgttatttaacagattcattgatatgaccgtagtgcaggccacaatgaaatatatgaggatttataacccctaccaatatgccgagaagcaggtcagagagctgattgcgcagctaaatgtgtccgtgctgttgacgaaatttgatgaattaatggaagtcactggaagcctgctggataaagccaaatcttgggggccggaatctattcgccagccgattgagacgacctggaaattactggtttctattcgtagtcaggccaatactatgctggagaaggcactggctccgctgaatgagacactggaaaagctggccgcgcgtctacgacaggaaggcgataattattataaggcgcatactggcgctaatccgcatcgcccgactcgtcttaaagatgcagaagaggctgagttattggttcataataagccggactgggtggatgtgggggtaactgagaaatatccagggttgaaacaggcgagcgcagaacagaagagtctgatgcgactggaaaaggataaggaaggctggcctgctttgtcggaagataatataaaaagctttcatcaaatgcgttatgttgagctgccacagaatgaaaaattgtaccgtgtattggatcctgccagtagtgataacagtttttgctggatgcgtgaggctgagtttatggctctgaaaagcaaatcgcagtggcggcgacgttttgcggtatggaagagctggaatgaaaatggcgaatatgtggtgtataccgtcccgccaggcaccacaatgaaagtctgggaaggtcccgctgcctcacagtcgcgtagtgtgactgataatggtaaaaatgtggacatagtgttggaaggtgggggaattcagatagtgatagacccggccgatctgaatctgaattatctggggaaacgtcagcacacagggtggggatatagggatttttctgatgaagtggatatgtatatcggcattccccagttgcaaactaaaattttcgtgcctgaagagtgataaccacaggaaagattgataaataaagaaggaggtaatatggcgatattgcacccccaagagtgctggctgctagagcgagcaatgtcggtggaatattatcggaagcgttatgaggcgtggcgggcattggttgagttatgtgagtatcaggtggctgaatgggcaaaaagcatgcctctggatatccgtcggcgcccgctgtatgaacagattgatgctgtctggggggggcgggtactgcccaatattcgcggtacattaaagtcggtacattatgattttctacagcgtcagcaaaacgatccaaatgcactgcattctgggggaaatatcagtagtgatcggcgggggttgatagattatttcccgaactggatgcctgatgtagctcagaagcaatatcagaaactactctggcgggcggggttctatgatgatctgataaaagacacttcgacgggttattggtacgaaggttcgctgacttattactatgaagagagtctttatggtccactggcgctacctatgcaactgccactctatgaactggatcacagcgtgtatctccgggaaggcgatccggtgacgattgacggtttgtacctgccggatctgcttgatgcgggggcgcgcctgatgtatctgagggagaatattcctgatgcatggcagggacgtgtgcgaactcagtatgtcaatgatgttggtcagcaggagtattactgggaggaaggggcatggacaaaaaccaactggatacggatacggcgggtgaaaaaccggtttatcaacgtgccgctggaaggctttttcccgcggggaaccccggaggagctttacaactggccgcaacgtcagcaacagtacatcacggaacagcagcggataagcgcgtccagcggcgaaccctgtccacacggcggtgaatggtcgatttttgtggaggacaaaccggtcacggtaacgctggagcagggggaactgatgccggaatgggaagacagaacaatggaggaggagcataaacaaggcgaaaagtttcatgttttgtggtccctgatggcgcgacacgacggcggcccggtgtgggtttctgaagcgggataacgtccgtcagaaagaaatggcaggcggggataaaaacgcggaaagaaataatgtcccctacactcactggggacataaaaggattttattctgacaggagaaagcgtaatgctgaaatcattattgacaggattgttctttatatattttctagcaggcaatgcatatgccgaggattataatgatattttctggggcatgttaaaaaaagaaaatcaggagattgtttttgtccgttgcgacagtccgtcattaaaaatgaaaatagtcagaaccgcagatgctaatcaagaaaatatagaaaaggcgtaccagacgtttaatcagagtaaaggccagtcgatgtattttgcgtttatcggaaacgtcaaagataccgggaatggcaattatgtatttaatatgtatgacgtgatggagacgaaaacggggcgctgtaatctgacagatgcgctcaataactggaatgtgtcacagtgacatttagcgtaacgtatttttccgtttaatcacgccacctgataaagataaaatcatgttcaaacggtggtgaagctgtttatttcgagttgaatgaagttggctttaatgaattcattttcaaaaatcatacttcaggcgctatcaatgatgaaagatggaagctacatgtgggcggaaactggtttttatagatcgcaaggtaaatatgactggtgaagttgagcatatttacattcttaaatagctcactgctaataccttccaccgattgatgacttatttttattaaatggataaactttatggcatggaaaagaaaacatattgaagagccagataggccactgaaaatacctctttataaatggcttctcaccttccttattcttagtgcgtttttattgctactcttttatctctttcgtgatgaaatcattagagataatgttactttattaatcttgttttctcctctaaccctgtgtcttttcctcttctgtttacaaatatatttttatgccagagccatgcaaaattatacggtaataatgcataacatcaataatatcaacacagaatgggaaaaatggggaggccgttatgtctctgtactaggcagtaaacttttccttcccggtgaagtggatggatcgtcactatcagataatcagtcagaggtaatgtatggtctagccgtgaggattgattattttagatgggaaactaatgactggttttctttctttactcttcttattgatgaaaatgatatttttaatcttcccgttcggattgcaaaagagtttattatccttacggactgtaatgaaagagaatatacccgtatggaggctgatttttccagagtgctggaggagatgaacatcatgttgccgtccggatctgtccgtcttgttccttctcttttatttgaacaacttgacgcctggctgaaagtgacagaagaaaaaatatatattgttctggttttacagcttaacggcaaagaaaattattcagatggcatcgtttcctttttattcgcagcagatgatgtagtaaaaaaatatcaactggatgaaaaagccagaatttttcgtccgatggttgtggtagccgatcgttttgataaagatctggatatttttattgatacgcaaaaaatagccagaaatgccacaggactgacaggggactgcgctggtctgttacccgtcagcggcagtattcttcaatgcttcaacgaaaaagaagggaaattacaagttgataatatccacgtaatggaaagcctcagtggtctacccggattgaattcggtctggttaactgcggcgttagcagtctcggcggcgtcttatcaaaaatcagattatctgatgatggccagatatgaagacgactggataattactactgtccacccggtggaggcttcatgaaatctgcaaacaataagttaacgattattgcagacgtattgctgctcctgctttttgcggctgtattgggttttattatctggcgttttggtgatctttttggattaaccggggataaaaataagttttatatatggctggctggcataatgtcgtttatttttctgcgggcatcctggtatttttcccgtttatacagggttcgcagggaacggcggcagtctgaggaacagggggaatacccggaaaaagaaattcgttatgaacctgggcaaagaacatctttgtattctgaactattttttcatcttcgcgaccgttacggtctgttctggcagcgtcaggtccgtctgctgctggtgacgggcgagcctgagcaggtggaagccatcgcgccggggctgacagagcagcgctggcaggaaggcgaccatacggtgttgatatatggcggcaaggcgtcggcagagccggataccaccctgctggcctccctgaaaaaactgcgccgcttccgcccgctggacggtattatctggccgctgacggagaaacagagttgccagacggcgcaactggataagggctggcgcgaactgggtaatggtggaaaattgcttggctttcaggctccgctgtatctgtggcaggtctgtgatgacggaggttatcaggccgggcgcacactacaaagcgtcggctgcctgctgccggagcgaagcacaccggaacaactggctacacaactggaagcacagaccccgcaactgacggaacagggaatgtcgcagttgctgaccaataaccggcacgattttctgttgcgtcttgcccacacacttacagagcgcggcatcgctcactggcaaaccgtcctgaagcccttgctggcaggcggcgcattcccttctctgcacctgcgcggcctgatgttcagccctccactggccgccgtgccggaagcggctccccacgcgtggctgtcatcgctggtgtgggcgggcgttactggcgacaatgcaaaaggccgcaccgtgggctttccgtggctgcgcaccgcgctgatggcctgcttctgcgtgctggcgatatggtggaccggaatgatgacctcgttctttgccaaccgcgccctgattcaggaaaccgggacgcacacagcgcgggccatcaatacccgactgccgctggcagagcaactggttgcgctgcacaccttgcagggcgagctcgagcgtctgcagtatcgtatccgccacggtacgccgtggtatcagcgtttcggtctggagcgtaatgctcagttgctgaacacggcgttccccggctatgcgcaggcggcaaaccgactggtacgcgatgtagcggtcgcccacctgcagcagcaactgaacgcctttgtcgccctgtctccgaacagtccgcaacgcaccgcaacgggagaactgcgttataagcaactgaaggcgctgctgatgacgtcccgtcccgaaaaagccgacgccgcctttttcagtaccacgctgatggcagataacctgcgctatgcagatgtaacggaaggtacccggcaaagcgtgctgccgtcgctgctgaccttctggatggcgaatctgccggagcatccacagtggaaaatcgccccgcagccggaactggtcggcgcggtacgcaaaattctgctgcgccagattggggtgcgcaatgcggaaaataccctctatcagaacgtcctgaaacaggtctcccgcaactacgccgatatgacgctggcggatatgaccggcgacgcgcaggccggctcgttgtttggtactgagcaaacggtgccgggaatgttcacccgccaggcatgggaaggtcaggttaaggaggccatagagcaggtggtgacggcccgacgtgaggaaatcgactgggtactcagcgaccgtcaacaggacgcttccgccgatatttcgccggaagccctgcgtacccgcctgacggaacgttacttcaccgacttcgccggaagctggctgacattcctcaatagcattcgctggaagaaagaggactcgctgtccggcgtgctggaccaactgacgctgatggccgatgcccgccagtcgccgctgattgcgctcacggatacggtggcatggcaggcggcggcaggaagggaaagccgtagtctgtcagactcgctgacacaatcagcaaaagagttgtttaacggtaaagaaaaaacaccgcagaacacccgtgccgcccgtgaagaagaagcaccaacgggaccgatggacaaaacctttgccccgctgctgcggctgaccggtgataaagccggaggcactggcgacagccagctcagtctgcaaacttacctcacccgcgtgacccgcgtgcgcctcaagctgcaacaggtcaccaacgccccggacccgcaggagatgacgcagcagctggcgcagacggtattgcagggcaaaaccgtcgacctcaccgatacccgagattatggccgtctgatagccgccagtctgggcgaggaatggagcggcttcggccagtcgctgtttgttcgtccggtggagcaggcgtggcggcaggtgctgacgcccgcagcggacagtctgaaccggcagtggcagcgggccattgtcagccactggaatcaggatttcgccgggcgttatccgtttaaggacactccgaacgacgcctctctccccctgctggctaaatatctgcgcgatgacggacgtataagtcagtttatcgctaccaaccttgcaggcgttctggaacgcgaaggtcgttattgggtggctgacaccatgaacacgcagggactgacggtcaacccggcgtttttacgcgccctgaatcgcctgcgcgatgtggccgacacagcctttgccagcggcgatgccggggtacattttgaactgatggcaaaaccggcacgtgacgtgatgaaaacgcatctggtgattgacggccagcaactggaatatttcaaccagaaagaacgctggcagcgtttcagctggccggatgagcagtggcagcccggcgcatcgctgagctggaccagtacgcagaatatggaacgtattctggccgacttccggggaagctggagctttattcgtctgctggaacaggcgcaggtcacacagctggacagcagcagctttatgctgcagtggcaagcgccggacggtctgccgctgcattacctgatgcgcgtcgaacagggtaaagggccgttggcgctgctggcgttgaaaaactaccgcctgccgggacaggtgtttctgaccgggaaagccataagtgatgcagaagaatacagggacaacgcagatgagtgagttactgcaacagttaacccggaattgtttctctgaccgggatgcgacggccgtcgcacaggagcaggctgcactgtggcagagctggctgctgccggtgacggaggattcgccggtgggtgaagaccccggctatcatgacgattttttgctgatgcgcgacgaaatgaacaaatccaccgcgcaggggctgacgctgacgcagtgggaatcggaactgctgtttgaggtaaaaacgcggcaactgaagctgttgcgcctgcgggcgcaccgccacgcggacaaagcggcgcttgcccggaaaatgggaaacctgctgggaacgctggtggtaatggatccggcacaggcggcggtactgtgcgacacgcagcataaggactgatggcgtttatcagaaggactaatacctgctgtctgtgatcaagggcttagggggactaagagggaaggagttatggcgcgaaggctggcaagactgggagataaaacgacatacggctatgtggcaagcgctacgtcatcgatcatagacggcaaaaaactggcgctgaatggcgacagggcgtggtgtaacaagtgcaaagggatgttcgggattgtcggcacggcgcgtgggtggtctgaggattcgctctttgtcggtaacggcgaccgtgtggcgtgtaaatgcgcgaacaatcaggtgattgccacttcggatttgtttgatgaatgaggtggcacggaaaaccataccacatcaggcaagacgaataatcttaccgcagcaagtacaaagccgcagaataaaaaatacagccatcagataaaacttttaacgaaagaggatgacgttggtttagagggtatcccttatgtattcattctgagtgatagtaccttcagaaaagggaaaacgaatccgaaccgggaaacggagcgaatttatacggatgcggcggagaaggttacggtgttagttggtaagctggcgtattcttgggaaaaaagaggcggcaacttcggttcattaaaggagataaatgaaagaaaaattgaactgatgacagctgagcaggagccggttgaaaatgttcagtggattactggccgggattatattgtggtggtggccgcaaggacgaaatttaaagattctatggggaatcagtatcgttttgtaaactgcggattaagacagctacggctttttcctgaagtgaataaagataattattatatacagcgtattttcctgatgtttcagcagggatatgtggagaaaggcattgaattaattaatgaatatgttgaagaattaagtggtcgcgtggtttatgtgaaagacaaggctgaatttattaaattcctgaacagcagaaaagacaagaacagagtaattaaggagatggttattctgtgtcacggaattatcgacactgcatcatttgattatcatcatgaaaataaaggaaaggaaaagaccggtgagtttaaatccagagatgttgttgacgttcaggaggctgtctttgattatgatgccgttgtcacaacctatgcctgccgggccggtatttctgttaatggaaaagacctgaccggaatggatgccggacaggaaaacagtccggcacaaaagatggcggcttgctgggacgtgagtgtcagagcgtttgaaatgcggtcggattattcatcgatttacggaacgaaaaaagaaatacgtgcagcagaaaattatgaagatgttattgaagaatacgaggaaagcctgagtgaatataataagaaaaaggcgaatggtgatgtcgatattacgccgccccagaaacccgaaaattatgatgagatgtcaaaacgctatgatgatgtcacagcgagagatgctaacgctaaacgcggtgctggtccaattgcgccaaatggtgcgtagcgtatgccgggaaccggggatagcccagaggggctgaaagaaggattacagacctatcaacccggagagtggacattgtgaactctttaaaaatgaagggatattactttctggttgttcttttgctgacagccttatgtggtggaggatatgttatgtatcaacagcaatacaaaatggcggtgcatgtgacaccggagagtgaaaacgatccggagtggccgtcgaaaaagaagtggtttgatgccagtgaatggttaagtactccacagtatataaaaatcaatgatttttatgtgataaatacccgctatgttccaattggtgatcttaacagcgatcagataatattttatctaaagaaaggtattaatggttcagaaaaaagattttcagagttatctgtattatctgatctggataatcaagagtttcgggaactaatgaaagataagctatcctctgaatatctcgaaacccagtttgaaaaagagaccttaacgccaactattgatttctttcttatctattttatctacaataataagaggtatgaggtgccgatccgtagggagtattcggggaataaatatcattattgggtattagagggttcggtgaaaaaagccggatactggcatgaaagatttcccacctcatattcatacagaaagtatctgaataagtaaaaaattaaataaacgcaaccgtaaaaaacatgatttaattattatatattgataattgctcgcgatatatttttcgtaaaataatatcaacatcggttttacatctgaagacttgcactatatttacttttaatgaaaggagaataactcctgcttatggacgacctgacccaacgctattacgaagccgaaatgcgctacctgcgtgaagcgggtaaagagtttgcacaagcgtatcctgatcgcgccgctatgctcaatctcgataagcccggcgcgcgcgacccttatgtcgaacgtctcttcgaaggtttcgccttcctgatgggccgcctgcgggaaaaactggatgacgatctacctgaactgactgaggggctggtgagcctcctgtggcctcattatctgcgtacaatcccgtcgctgtcggtggtggaactgttaaccgatcatcggcaaatgaagcagagcgaaacactgagtgattttcaggtgctctcgaggcccgtcggcgaacaccggacacgttgctgctacagcgccacgcgggatatcaccctgcttccgctggctttaccagaggtgtcgttacagtacgaacaggatggacgctcggttatccgtctgcgctttgagtgcagcccgctggctggcgacgggtcacagattgatttatcgagactgccgctctatctcaatgcggacagtccgctggcttgtgcattacaccgggcgctgacgctgggggtgcagcaaatctggtttcgcctgccgggggaggaacgtcggacactggacggctatttttccccgatggggttcggtaaggacgatccgctctggccaaaaggcgaatcggccttcagcggctaccaactactgctggagtatttcaccttccgcgagaagtttatgtttgtcgccctcaacgggctggagaatgtggtctggccggcaggaatgagtggattcgaaattgacgtggtgctcgcggaaagctggtctcacgatctgccgttcagcaccgaaaatatccgcctgcactgcgtaccggtgatcaacctgttcccgctggaagccgatccactgcatctttctccgctggaaaatgaatacttgctgcgccccatgcgtattcaggacgggcatacggaaatttactccgtcgataatattatttcttcgcgacacaccggcagtcaggcatatgtgcccttttccagttttcgccaccggggcgggatgttgcgtcacgattcgccggaacgttattaccatacgcgggtaaaacgcggcccttccggtttgcatgatacctggctgatccttgggggcgacgcattcgatatcgaccgcctgctggaagacgaaaccctgtccctgagtctgaccggcaccaacggtcagcttccgcgtaaagcgctgcagagcacggtgctggacacccccgtctacgccacgcagcatacactgcgggtgcgcaacctgtgcgcgccgacgcagccctgttatcccccggcgcgtgaccgtttccactggcgggttctcagccacttaggctccaacttcctgtcaatgatggaaaacgccgaaatcttgcgcggcacgctggcgctgtacgactggacggaaagcgaaatgaaccgacgccgtctggaggcaatcgttgacgttcagcatcacctgattcagcgttttgaaaaaggttttctactgcgcggcgtggatattcaggtcacgctggacagcaacggtttcgccggcgaaggcgatatcaccctgtttggcgaactgctgcaccgctttttcgccctgtatgccgacatccacttatttactcagttgacgctgattctgcaacctacaggaaaatgtttgcaatggacagaacaccacagccagcgcgtaccgggctgacggaaaggcttgctccggacattaaccgaattaacttttaccgtttctgccagcttcttgaacaaagccaaccacagacgccactgctggggagcacaaccaatccggcagacgatcctgtccgttttcgtccacatccggggatggggttcccggtaagcgaactaaaaagcgtcgaacaggatttggatcatcctgacgcgccacccacggtgcgcaccacgtttctggggctgtacggtgtggattcaccgctgccgacagcctatctcgactacatcgcgcagcgccgggacggccatgaagcgatgatggcgtttctggacatttttaaccatcgctttatcactcagtactatcgtatctggcgcaaatataattaccttacgtcgtttgaaccgggagccgtggataatatttcccgctgcctgctggggttgattggtctgggcattcccggcagcgaaaatcatatcgccacgccggtctcgcgttttctggcattactcagcgtgatgcgtctgccgacgcgtacagcagaaggcataacggcgctggtcagattactggccccccagacgcaagcgacagttatcccgcacgatccacaacaaattgtcctgcctgaacctgcgggtttatcaaaaagatcaggtatttgcctgaaaactcgggcactgctgggcaacaccggcactgacgttaacagccagttactgatgaagctgtataccgaagacgacggagaggcacgcggctggctgccgggcgggcaactacataccgacctgctggtgctgttgcgtgtctatctgggctggcgctaccaggcccgcctgcaactgaccttgcccgtcagtctgctgcctccggcacagttaggaaatcagcgcgttcaggtaagccgaacgggcgtgctgcgggcgtcttttgctgccccagtcgccggtacggtcacggtcagtctcgggcgttatcagggactcatgcccacatcatccacccgcgacagggagagtgttactcatgtttcttacaccctataaacgacatgcagtcagcgtatttgccgccgtgacgctgctgagcggctgcggtctgactcagagagtgactgacggcactaaagaagtggcatcggcgattttctacaagcagatcaaaacgctgcatctcgattttgtatcgcgcagcgcgctgaatacagatgcgcaagacacaccgctttccacgatgatccatgtctggcaactgaaaacacgtgagcgttttgacgaggccaactatgacacgctacttatgcaggaagaaaaaacgctgaaatcagatgtactggccaaacataccgtctggatgaagccagcgggtgcggtttccctgaatgtccctctggataaagagacccagtttatcgccatcgttggtcagttttatcaccccgatgaacaaagcaacagttggcgattggtactcaaaagggatgaactggaagctgacaggccccgcaccatagagctgatgagaagcgatctccgcctgctcccccttcaggataagtaaccgatggcagcatcttctttatttgaaatgctgactttcagcttcagtggcgagctgccgctggagcaggtcagcgagcgggatcagcttattctctccgttatggacaacatgcagcgcatcatcaactgccgggcaggaacgctggcgcatttaccggattatggtttgccggacctcagcatgattcatcagggaatgaccgcgggtattcatggtttgatacaccagatagaagagacgttactgcgctacgaaccccgcctgagccagttgcgcgtggagttgcagccgcagccacgtccggggcatctcaattatcttatttatgcccaacttcccgataccggctggatacgctttgatggtatattttctgcggaaggccggattgtgctgcgtcatcttaaacagcaggagcgcgcgtgacttatgtcaggtagcgcaccttcattgagcttgcagattgcgccagaaaagtaacaaggaaaatcaatttattgattttcggctgataaccacaaaggaggaaaaaccacgctttttccttttttgccaacaacctgaaacaccctcaagggtgtttttttgtttctgccgccggcaaaacctctgccgaaaacgggaacggccattgccgcccccatctcctgcttaccccttcggtaacacaatattgcttgccgccagcatgcccatgcgatggtacatcgcgcaggccgcctcgacgatcggcatcgccagcgccgcgccgctgccttctcccagacgcatgcccatattgagatacggttcgagacccaggtgcgccaacgcgatacgcgcccccttctccgccgaatagtgggacgggatcagatacggtttcacctccggcgctatctgacacgccgccagcgccgccgcgtaggagagaaagccatccagcaccaccggcagcccacaggacgccgcccccagcatgacaccggtcatccccagcagatcgaaaccaccgactttgctcagcacatcgaggccatcattcgggtcgggctgattgacggcgatagcccgccgcaccacctccaccttgttgccaaccttcgccagcggcagattggcgccaatcccgaccacctcctgcgcatcgctgccggtcaggacgctgacgatcgccgccgccggcgtggtattggccatccccagttcgccgacgccaaacagggtaacgccctcctgggccagcgcgcgggtgtagcgcatcacctccagcaacagctcctgcccctgctcacggctcatcgccggaccgcgggcaatattgccgcagccccgcgccacccgcatattcaccacgccggggagcggtacgctatcgataccgacatcaattacatgcactttcgccccggcctgggcggcgagcacgcagacgccggtggtgccgcgggtcatatttgccgcctggatggcggtgaccgccttcggcgaaatcgccaccccttcgtcccacactccatggtcggcgcacatcaccagcaaggcctttttcgccacctgcggctggccgcccaggccgggcattcccgccagctgcaccgccagcgcctccagacgcccgaggctgccggggggcttgagtaagccgtcgatgtgttgctgtgcccgcgccatggcgtcggcgtccggcgcggggatcgcccgcagaaccgtgtttaaattttgcatacagaatccctgccagggctggcccggtcagccagcgattgagttatttgattttgacgccgatgccggagaccaccagccagaccgcatccgccgcggccgccaggcgctgattgacccgcccggcaatatcgcgaaaatgccgcgccaggcggttctccggcacaatgcccatccccacctcgttggtcaccagcacgacgtgcgccggacagcgctgacaggcggcaatcagcacgccaatttcgtcatcaatagcccgttccatggcggcgtaatcccagccgtcggggtcgctgtcgccgccgagcgcgaacagcaggttggtgaccatggtggtgatgcattccagcaaaatcgcctcctctggggcgatagccggggtgatcagttcatcaagctgctgccagcgctcggcggtgcgccagtgggcgggcctgccgtcgcgatgatgctggatccttgcggccatctcgtcgtcaaagatttgcgaggtggcgatatataacacctgcggcgcatcggcaatcagcgcctcggcatggcgacttttgccgctgcgcgcgccgccggtaaccagagtcagcataggggctcctgatgttggcgcatgatggcgtaaattttatcgatggcgatatgttcgcgcatggcctcggccagccgatcaaactggcgggttttatagcgggcatactccagggcgctgtccagcggcgccagccctttgcgctggcgcaggccgttgagcagcgcccgggtaaaggcatcgctgtcgaacaggccatggagataggtgccgaacgccaggccgtcgtcgcttatcgccccgtcgtccactgcctgccccgctttatgcagctgcagcagcggcgggcagcctgcctcgcggcgcgtctcgcccatatgaatttcgtagccactgacgcgcagccccgccgcgtcggctaaccaatccgggagcgcagaccccagggtcgcctgcacctgggtggtggttttgtgctgggcgaaatgggtcacggtcttcagcacccccagcccgggctgggcgccaaggccagactccacctcatcgataatggtttcgcccagcatctgatagccgccgcagatccccagcagcggcaccttgcgctgccgggcctgctcgaccgcgtgcgccatgccgctctcgcgcagccagcacagatcgccgagggtatttttactgcccgggagaatgaccaggtcggcgtcggccagcgcctgcggatcgcggacatagcgcacccggacgtctggctgcgccgccagggcgttaaagtcggtaaaattggcgatatgcggcaggtgaaccacggcgatgtcgatgtcgcgccggtcggtgcgatggtatttcccggcctgcagcgcgacgccgtcctcatcctcaagatccacgtcaagccatggcataacgcccagcaccggcaccccggtcaacgcctcgatttgctctatcccggagcgcaggagcgccacatcgccgcggaatttattgatgatcacccctttcacgcgcgcccgctcctgaggctgcagcagcgccagcgtgccgtaaatcgcggcaaacaccccgccgcggtcgatatcggccaccaggatcaccgggcattgcgccatctcggccatgcccatattgacgatatcgcggtcgcgcaggttaatctccgccggactgccggcgccttccagcaccagcgcctcatactctccggccaggctctggtagaccgcgaggatctgctcgcgcaggcgtggcttgtactggtgatagctcaccgcatccatgctggtcgccacctgccccatcagcaccacctgcgcctgacggtcgctggtgggcttgagcaaaatcggattcatgcggacatccggcgcaatcccggccgcttcggcctggaaaatctgcgcccggcccatctctttgccatccggcgtaatgccggagttcagcgccatattctgtgatttaaacggcgcggtacgcagcccatcctgatgaaaaatgcggcacagtcccgccaccagcacgcttttccccacgtcggaagccgtgccctgcaacatcactgccagcgtcatgacgcctcctttatcgcgcctatcgcgttgttgtgcatccgctgaaaaaactccgcctcggttttacacagcggcagccccagttcgctatgaagtttcaccagccacggctgcgtcaatcccgccctgtccatcgtctccgcgcaggcaaatacctcgccgggatcccccgcggccagtacttcgccgtgacgcagcacgtaaacggcgtcgctcacctcatagatcagatcgatatcgtggctggagatcaccacccgccgcccctgcccgacaatgcggcggatgatggcgatcatctgcgcccgcccgcgtggatcgaggcccgcggtgggctcgtcaagcagcaggtagcgcgcctgcagcaccagcgccccggcgattgccacccgttttttctgcccatggctgaggcactggatcggctgctggcgaaacccctgggcatcgacgagagtcaacgcctcatccacccggcgggcgatctcctcttccgccaccccgaggttacgcagactaaaagcgatatcgctgtcgatatcggtatagaagatttgctgatccggatcctgaaacaccgtcgccacctgctggcgcagcgccagcagaccgcgcttgctgtaattcagcgcctctccctgccacagcaccgccccctgctgcgggcgcagcaggccgctcaggttcataaacagcgtcgactttccgcagccgttggcccccaccaggccggtcaccgcatggcgggaaaaatccagcgtcagccctttaagtaccggctcatcctgatagcgaaaccagagatcggttgtggcaagcatacttatccttagaggtgaaaatcaccctggtacaatttgatatccagcgccgtgctcatctgctgatagcgcaggaggacgcgggtgaacagcagtcccaccagcatcgccagcgagcgatagccctgcggcacgctaccatagccaaaacgcagggtttgcgcgcggtgaatcgccatcgcctcgtccaacagaataaaaatgaagcgccaggtcagcaggatctgctccgtcaacagccgcggtacgcgaccgcgcttgagcaagataatcagctgtgggaaaggcagattaagcaccagccagagcgtggccgccatcgctgccaggctgcgccagaaggtctccccggccacggccagccccggagcggaaatccctatcgagaaagcgcccagccgcaagctcgctaacagcatctgcgggtcgcggctaacgctgaacacaatggtcagcacgccgaccagcaaaaagccaaagggtagcgccatccagcggcaccagcgccagaatgagacccgcagcagccagcaggtcagcgcggcggtcagcgccagcgtcagcgcctggccccacgccggcagcgtaaaggccagcgccatcagcagtagccagagcagaaacttacgctctggcgccacctgcaaccagcggctctggtagctgagtcggtcaaacccggtcatcacggcgctgtctgcccctcgcatatccgagaatgtaaaaaatcaccgccgcgccaagcgagccctgcagggtaaacagcagactctcaatctcgccgctcgccggttcatatagcggctggaaccagggttgataatccggcgccaccacctggatctggctctccgcttcgccgtccgagccgccaaactcgccgccgtggttaataaaaaatggcaggatcatcagggcggccaccatcgccaacaggatcagggtctttttcatattaatgtccctccgcggcgatcagtcgccgtttggttagctgatcgtagatcatcacggtgagcaagccttccgcgatggcgatcgggatctgcgtcaggcagaagatgcccataaacttggcgatcgatccgcctgccccggttgccggatcgggaaaagccaccccgagctggacggaggtgacaaagtaggtcatcagatccgccagcatggcgcagagaaagaccccgacatcgcgacggatccccgcccgacaggccagcttccacaccagatagccgaccatcgggccgatcaccgccatcgacatcccgttggcgccaagggtggtcaggccgccatgcgccagcagcagcgcctggaacagcagaacgatcgcccccagcaccgccaccacgcccggcccgaagaggatcaccgccagaccgacgccggtcggatgcgagcagctgccggtcaccgacgggatcttcagcgccgaaagaacaaaaataaacgccccgcagagggccagcagcaccttctgattgctctcttcctgaacgatacgccgcaggcgcaccaggccgtaccacaggcagggtaaaaacagcagccaccacgccagcgcccacatcggcggcaaaaagccctccatgatatgcatggcgaacgcctcctgcgggacgatgatcagcagaacagcggccgccagccccccatacgaaagctgcttcagcgatttcacctgattcattacgcctcctcccactgtttgttaaccaggatggtcgagaaatagggcagcggctggtcatcgctgacctcgcgcagacggcgccagcactgctcgcccggcagggtggcctctgacatcatcagcgccgcatccagcagccccgcctgcgccagcagcgccttaatgcgggcgaagcggccgtagactttcatcagtaccagactgtcatgctggcgcagcgccgcggcaatgtccgcttccggcgcggtgcaggagatcaccgccagcgactgctgctccatggccagcggggttttcgcccgcgcggcaatggcggcgaaggaggtaacgccagggacaatctccagccactccgggcagccaatccgctgcagcagaaagacccaggtgctgaacaacatggcgtcgccgagggtgataaacccgacctgcctgcccgccgccacctcctgggccagcgccgcggcaacgtcgttccacaccgcctctttttccgcgctgtcggcactcatcggaaaatggcagcagcggacctccgtgtgtgcgcccaggtactcgcgtacgatggagagcgccaggctgtcgccgcctttgcggccggctggcgcatacagcacatccagctggccgaggatccgcgccgcacgcacggtgatcagatcggccgcccccggcccgctgctcagggcgtatagtttgccgctcatgctgctttctccatcgtgtcgttcagcgcctgctgcagatgggcgacaaatatcgcccgcaccgccggattctcccctaacccgttaagccacggcgtggcggggataccggcggcattgaagcgggttttccacgaatcgtcttcgtcggaggccatatcattaatggcatgatcgccggccaccagcatcagcggcatcagatgcacgccggtcacgccctggcgggagagttcgttaatgacgatgtccacttcgggatagctttccaccgcccccacccgcgccggaaaaccctgcaccgccatcatatgatccagacaggcgtaggccgcgaaggcgtggtggctggcgccgtgccccataaacaccactcgctccgtcgccgccagcggcggcatctgctgacgcagggcctgcatcagctgcacataatcgccatgaccgctcaacagcggcgcgcccagcgtcaggcgctgaaagcgcgggcgcatgctctgcacttcgcgaacgatcttctcgtactcgtcgccgttgataatgtgcagggactggatagccacatcctggtatccctgctcggccagcttttgcagagcctgcagcggagtatcgatatgaataccgtcgcgctgctgcagtttgcgaataatcatccccgaggtgaaggcgcggaacagcgtgcggtccgggcagctggcggccagatcgcgctcgcaggcggcgatgttcttttcgcgggtgtcgtgatagctggtgccaaagctcaccaccagaagtgcttttttcatatcctcttcctcaagtcgccgacagccagcgcgtcagccgcgcagtgaaatcggcctggctttgcagtagttcatcgcccgtcaccagcggcgccggacgggtaatgacgatgcaggggatccccgcatcaagacagggttgtactttttcctgatagcctccttccgcccccgaggctttcgtcaccacaacatcggcccggcactggcgataaaaggcggcgttaaattcggcgctgaacggcccgcagagggcgaagatctccccgacgccaaaccccagatcgctacagtactgaaccacctccggcaccggcagcacccgggcgagcagcgttttctccgccagtcccgcccgccaggccgccagatctttgctgccggtggtcagcaggatccgctcgccgaggcgacgagccaccgcgcaggcctcgttcagatcgccgaccacgtgaagtaacggatggcgcagatcgctcagctgctccggcctttgatagcggctgagcagaaccccgacgctggcgcaggcgcgcacaatattctggctgaccacctcggcgtaggggtgagaggcatcgatcacccagcgggtgcgctgcgctctgagccactccgccatctgctgccactccatacgcccgcagcgtatctgcccgcggatatcgccggccagccgctcgccggtaggggttgccaccgacagggtgtagcgcacgtcggcggcgtccagctgctggcagatcgcccgcgcatcgctggtgcccccgataaccagcacgtcgccgtgattcacagcgcgtagcctcgcggggtgatcatcaggccgttgtcgatgtaagtcgctttgttgccaacgatcaccagactggtcatatccactggggcaaaatccatctccccgagggtggtcagccatttctcctgctttttgcgtccggcggatttgactacgccgaccggcgtatctgcgcttttactggccgccagcagcgcaaaggcgcgcgccagatgtccttcgcggccgcggctgcgagggttgtagaaacagataacgaagtccgcttccccggcggcgactatgcgtttttcaatcaccggccagggcgtcagcagatcgctaaggctgatatggcagaaatcatgcatcagcggcgcgccgagcagcgaggcggcggcgatactggccgtcatccctgggatcaggcggacctcaatgtccaactgctgcttattaaccagctccagcaccagccccgccatgccgtagatgccggcgtcgccgctgctgatcagcgcaacgttgtgcccggcctgcgccagctcgatggccgcctggcagcgctcaatctctttgcacatgccggttttgatcacctgcttgtcgccggtaaaggctttcaccaggtgggtgtaggtcttgtagcccaccacgatctctgccgcctgcagggcctccacggcttccatggtcatcatcgcctgcgagccagggccaattccgattacgcttaacatcagtgtgttactcccaaagtaatggtcacgccctgctcacgcagggtttcgccggacaggtttccctgactcagcagccaggccaccgggccggagacgctgccgacgccgaccgtttcccggacaaaagacgaggccggaaagcggtgctcgtgctcgcgcagcgcctcggcgctaaaggtttcgaacggcacccggcagcggtgagccagctggcgcaaccccggctcgtttgccttcaggctcacgctgccgatcgctttcagcgccagcgggtcaagacgctgagcggcaagctggcgatccagcaacgtactgagcagcgcgcagggggtgtcgcgccgacagccgatccccgccaccacccgctggggcaccagcttccagtgaggcaccggcagcggcggcagcgaccggcgcagggtgacgcagatcagggcgtcgagcgccggcaagctcgccaggtcgcttaccgggataaacccgcgccggtcgcagcggcttagcgccccggtgaattcgccgtcgcaccacagccccacccgcttaccgctcaccagcatctggttaacggttttcaccgccgcgcgaaaatcggtcatccgggcgttcagctggaaggccagcgtgtcgagggcggccagctcgttgacgtcggtggcggtggtgatcaccgggtcggcgtcgagcatcccggcgagatagcgggttagcgcattggcccccccggcatggccggagagcaagctgatgacgtgccgggcgcgctcatcaatcaccaccaccgccgggtcgctgagcttgtcattcaccagcggggccagcacccgcacggcaatcccggtggcgccgataaaaatcagcgccgagaagctgctgaacgcctcgcgggcagcgctggcaaagccgccgttgaaggggataaacccctcttcctgcagcgcttcgctggtgtaacaggtaagcggcagcatggccgccagccgttttgccagccgcacgccgccgggcgtcaggcaaaacagggcaatggattcaggctttacggtattcatggctaaaatccgctgcgtacagttttgagtagtgatactcatcgccgaggaaggggccgaccaggatcagcgccgttttgcggatcccggcgtcgcgtactttgtcgccgatgtccgcgagggtaccgcggacggtctggctttccggccaggtggccttgtagatcaccgcgaccggggtggtcgcggggtagccgccctccaccagccgctccgccacccggtgaatacgttgcaccgacaggtaaatcgccatcgaggtttgatggctggcaaaggcttccagctgttcgcgcgcgggaaccggcgtgcgcccttccagacgggtaataatcagactctgcgagacttcgggtaccgtgtactccacccccagctccgccgccgcgccgaggaaagcgctgacgcccggcaccacctgccagcggatcccgcggcgggtcagctcttcgccctgctcgcgcaccgagccatatagcgagacgtcgcccgtctgcagacgcaccaccgtttttcccgccttcacccccgcctccatcaggtcgaggatctgctccagatgcagcgcggcgctgtcgtggcactccgcctgtggcggacagtaggccagtagctcggtgttgatcagcgacccggcgtagatcactacccgcgcctgctgtagcagacggtagcctttgagagtaatcagttcgcgatcgcccggaccggcgccgacgaaccacacgcaatggggatcaaaagtctcagccatggttttcttccttctgacaggcgatgacaaaaacgggattatggggtttgaagtagtggccgctgcccagggtagccagggtggagaccgccagctgctggcagtccacctcgtggatgccgctctgccgcaggtgcgccagagcgctatgaaggttttcctgcaaaataaaagtcatcaccagccggccgccgggatgcagctgcgccagcgaccagtcgatcagcgccgtcaggtggccgccgctgccccccataaagatcgcgtcggctttgtcggcgaccgccagcggcgcaacgcccgccacgatagcgatgttgtcgcagccaaagcgctgccggttctccgccagcaggcgcagcgcgtcggcctgacgctcaatcgccgtcacccgcagcgccgggttctgtagagcagcctcaatgctgacgctgccggtgcccgcgccgatatcaatcagatggcgcgcccggtgcagctccagcttcgccagcgccagcgcgcgcacggcctctttggtcatcggcacctgggcgccgcgcaaaaacagctcatctttcatcgaggatcaccaccgcattcatctcatattcgtcctccacggcgctgaccggcagccagtggatccgctcgttttccatcgccaggttctcgcctatcaccatccagcgatggcctttgccgcgggccatcagctgggcggctatctcccgcggtccgcagcggccgtcggtcaccatggcgactttccggtgggcggccagcgcatcaaagctcaccgcccggccatggctgctggtcagccacatatcgttcatgtcgatgcccgcccgggcgcagaggtactgcaccgcgctgatgccggggatcacctgcactcgttcccggccaaaatgggcaatcagccgggtgccaatgccatagaacagcgggtcgccagaggccagcaccacgacgcggcgcccggtacgggcctcgatccacgccagcagcgccggcatatcggccctcagcgcgaagcgctcgccggcgaagtcgggaaactgctggagatgacggctgccgcccaccagcgcctcggcggcggcgattgcctcgcgcgcggccggggtcagccactgcagccccgccgggcccattcccacgaccgtcaacatgtcagctcccgggcaattgccgccagcggacggctgctgcccagtacctggttatcaaaagaaaacagaaccgcgtcgcaggtgggcggttgctgagtgaagcgcagcatctcaagaacacgctggcagattcgctcagccagatggttatagaggcgctggtatccccaggcgtcgatatgctccattgccgcttcggtagtgtcgcactcgctgaccagcgtcagcagcggcagcggcgcgccaagcagcgccagatgagcgacgagagtttccatccgcgcatcggcgatatggctgtgggtatgaaagatcccggcggcgattttgatcagtttgccgggatggccaatgagcacaatctggcggaaaccgagccgaaccgcctcttcaatcatgtagccgacgaagttgctcatggtgaccaccatctgcgggtcgatgcccatctgctcgcggacaaagcgctcaccgtggttgcccggcaccagcaccacgcgctccagcccggcggcgcgttttatctccagctcgagggagagcgagcgcttccagctctcttccgacatcggggtaacgatccccgtggtgccgataatcgagatcccgccgaggatccccagccgggcgttataggttttttgcgcgcgaagtacgccttccggagcaaaaatctccacctgcgcgccgcgggtaggacctatcgcttcgcgcacggcggtctcgatggtgtgccgcggagtgcggtttatcgccgggctgcctgtcggcaggccgatccctttgcgggtcaccgtgccgataccctccccgccctgcaggctaatctctccgctgtcattgagggtgacccgggcaaaaatcagcatgccgtgggtggcgtcgacatcatcgccgccgtctttacggatcgcggcgaccgcctgctgcccttcgacgtgcggggactcaacgttcaggcacagggtgacgccggagggggtgacgatcgagacctgatgaatcagatgctggcgcatcaccatcagcgcagccacttttgccgccgctgtggcgcaggagccggtggtgtagcccttgcgcagcgctttgccgtgatgccacaccggggcgtcaaaggtctgatcgctcattgcgcctcccgcaggtggtaaagcagagcgttcacaatcgctgccgccacgttgcttccccctttgcggccgagcgcggcgatggccggcaggccgctctcgctgagcgccgctttcgactccgcggcgccgacgaacccgaccggcacccccaccacgccgccgatggcggtctcgcgatgttccagcaggcgaaacagcgcggttggcgcattgccgaagacgaacactttctccccgggctcctgcaccgcaatatccaccgccgccatcgagcgggtcatcccccggctttgcgcctcgcgcaccacccgcgggtcgctgatatagcagcggcattcgccgccaaagcgggccagcagggttttgttgatcccggacagcgccatggtggtatcggtatacagcgtgcagggccggctcaaggcctcactcagcgcgatcagggcatccggagaaaaccacagaatatccagccagtcgaagtcagcggtggtgtggatcacccgcttgataatcgcctcgtgcagcgggctggcgaaacggtagtccggtcgcgtttcggcgatgatctcgctgatgatgtcgaagcttttcgcctcgatcgcctgcggttgttggatgtactgcatcaggttctcctcaggccgcgccgaccagccagtagcgcacgccgataaacagcgccagcgccaggcttgacgccacccacattaatcgaatggttcgggaaatatcgtccaccgcgatgtcgcggacggcgtcgcctatccagggcttttcaacgcgctggccgaagtaatcgttcgggccgccaaggcggatccccagcgcgccggcgacggtcgcttccggccaggcgcagttaggactgctgtgctgatagcgatcgcgccagcccgtacgcagcgcccgggcgccatcttcccggcatagcaccgcggcaaggctgagcagcagccagctcagccgggcgggaaggaagttggctacatcatcaagacgagcgctgaccatgccgatcgcccggtatttttcgtgtttatagccgaccatggaatcgagggtgttgaccgctttataggccatggccagcggcgcgccgccgaggagcaggaaaaagagcggcgcgataatgccatccaccgtgttctccgccacggtctccaccaccgcacggttgatctgcgctggctggagctgagaggtatcgcgcccgacaatccaggagagcttatgccggctttcggcgagatctccggcctgcagcggccgggccaccgccatcgccgactgtgccagacagcgtcccgccagcgcggtgaagatcatccacacttccaccagccatccaagccaggggtggatcccgtgcgccagcgccagtacgccccaggccacgccccatgtcaggccgataaccaccagccacatcaccccgccgccgatgcgcagcgcccggtcgctatggcagatgcgtcgcactacacgctggctgacggcgatcaggcgacctatccagcgcaccggatgcggccagtgcggcggatcgccaatgacgacatcaagtatccaggctacacaccaggcgagaagggtcatagcgccctccttgctgcccgcaaccagtggttgagcatggtgggacgctgggcaaaatggacatggagatagctggcaaaggcgctgccggactgccatcctccctgccactgctggagcgtcttaccgtctcgctgtttacggcaggccagtacggcgggggtggagggagaaaaatcggagtaatgaaattcatggccgcgcagccactcgccaggggctgccagcagcgtctgctgctgcgcctgcgcttcgcagtagccgaaccgggtcagacgcctccccattcggctgtgtccgggaataatatccgccatcgtgtagcgctcgccgctggtgacttccagggtcgagcccagatacatcaggccgccgcactcggcgtagatcgccaccccgcgccggtgcgccgcgcgaagctgtgtcagcatctcgtggttggcggatagcccggccgcatgcagctccggatagccgccgccgagccagatcatctggcaggccggcagctggcgatcgcgcagtgggctaaagcgtaccatcttcacgccgcagcgcgccagcagcgccaggttatcggggtaataaaaattgaaggcctcatcgtcggcgagggccagcgtcagtccttcgccggcatcggcggcaagctgttctccccactcgccgatcggcatggcggccagttcgctgagggccagcagccggtctatatcgagggtgcgccccagcaggctggcaaaatcccgccatgcctgctgattgaccaccgactcgcgggcggtcaccagccccagatgtcgttcgggcagcgccacgccttccacgcgcggcacatagccgagcactggcacccgacagtagcgctcaatggcgcttttcagcagctggaagtgcgcgtcgctgttgacccgattgacgataacgccagcgatgtcgagagccggatcaaaatgttgaaaacccatcaccgtggcggcgatggaggtcgacaccgctttgccatccaccagcaaaatcaccgggcagccaagctgcttagccattgccgcgctgctgcagtagttagggtcgatgccgtagccgtcatacaggcccatcaccccttcgataaccgcgatgtcggcctgctgtagctgttcggtaaacagcgcgttgagtatcggggcgggaagcataaagctgtcgagattgcgggaagcgatgccgctgatggcggtgtgccaggcggtatccaggtagtcaggccctactttacagggttgcacccgcataccgcgttgttggagcaagctgagcaggccgagcgtaacggtggttttgccacaaccgctgccggtacccgcaagaatgaacgcacgcctggttgccataccctgtcctgttctggcggtcagggtatagctacgcgcatgcctggtcctgcgaccacgcaccgctaagccacccacttcccaccgaagttgttggtcagttaccggcaggcaggtcttctggcttagcctcgttctcgcccgcccttcccaatctttcgatcagtggtttttgcggggtcgtcagcatcacagcagcgggggctgcgggggatttacacccccttccctgacaccaaactggtgtcgaacctgtcggtttgtttcgccgatgcgccctgcatcgacgggtattactttatgttttcttttaccgtttcatcactcgtcacaatgacgtcagtgaaggaaagcggtgttgtgataatcagctgtctcgtattaacggacactctatctcatcacaaaaataaaaactggtgtagtttacccctcgaatatcactattttgttgcgctatgacaatttattgctctactgtcgtttttttcattttatattgatgaagatactcggggatatcaaaaatcggcaatagcaaaatattgtcatttaaaaagactcagtttgtgatccggcattaatttgctgacgaaatgcctgcggcgttacctgataggtctggcgaaacactttgcaaaaatagctggtttgcgaaaaacctaaattccgcgcgatgctggcgatgctccagtcgctgtggcatagcagctcttttgcgctcgccatccgctgctgattgacccaggcgttaaaaccgatcccctgatactttttaaacagtttgctgaagtagtacgggctgagatagacatgcgccgccacatcctccagacgcagctcatcggagagatgcgcgtcgatatagcgcagcgccttcttcattttgccatcgtgcggcgagggcgcccggctggcctgcgccgggtcgttctgcgacgggttatctttgataaccacaaagttgagctgttttttcaggcaattctcgacgatcagcttcagcagatccgccgaagcgataacccgcgaatagtccatctccggcacatcgcgaaacgcctggaccagcgccggatcgtcctgccagcggtcatcgacgttcaagatatcaaccagttcaacatcattgctcagacgcacctgcccgcacagcacgaaaccgaccaggtggccggcaatcaccagcgggatggaaaaatcggttaaccccgcatgacagcggtagatacacagctggtcttttttcgaggcttccagcccgccgcagcggtcgctcatgcgacagcgtccgctgtgctccgggtgctgacgcatcagctggcaaaacggcgtgaaattaaacaattcagaaatctcatcaccgtgaatattgacgaccacaaccgccagactggtggcttgcgcaaaatcctgtgcgattttattgatgagttctgagtttagggtactcgcagaaatcatgataaaacccctcagttaattttttgttataaataaaacatatttttcatatttaccttttttagcatcagatcccatcgacgataaaaaagtgcattgacaataacaaaagtctcccaacccggggagactttttgagcggttcgtgatatcggttcatgaaattagcctggctatttcacagatacattccccttatgacgctaacgcgtattttcttcctccacgcaggtatgacagggcagattattggcgataagaaaacgataaattgcggcgccgaggcaggcccctaacaacggtgcgataatgggcacgataaaatagggaatatctcttcccccggtcatggcgatattgccccacccggcgaaccaggtgaacaatttcgggccaaaatcgcgtgccggattcatcgcgaagccggtaagcggcccggtcgaggcgccgatcaccgccaccagaatgccaatcaacagcggcgccagtgggcccttgggtacgccgttgccatcatcggtgagcgccatgatcatccccatcagcatcgaggtgatcaccacctccaccagcgccgcatgccagatgctgagctcaggcgccgggtaggtgctgaatatactggccagctgcaggctttccaggctgccgcgcaccatatgatgcaccgtttcaaattgcgtaaacagggtgctgtaaagtatccaggccagcacggcgccgccaaacgcgccggcgacctgagccacgatatagggcaccacttttctgcccgggaagcaggcaaacagccacagggcgacggtgaccgcggggttcagatgtccccccgaaatgccggccgtcaggtacaccgccagagaaatacctagtccccagataatacagatctcccacagccccaggctggcgccggtcagtttcagggcgctcaggcagcagataccaaaaaacagaaacagcccggtgcctaaaaactcggcgatacattgcgcgcgtaaagaaccattcattgtgacacctcgtgacgaagttcgtgtccaggccagccaaccatccgctggctcgttgggtacggcgaggcccactatagaaaccggcagcggcaaagtgttggcatcctgcggaaatcgggcggcgtaaagtcgccgaagaagaataatttattgctatttgttcgcgaatccctgcagcaatggcgggcgttcaggggggtattttaatttccaactaaatgataaaaaattgcgaaagcgcagtgcttattttccaacaaatatcacatcacgcaaaatatcgcatagcaaaaacaatttaaaaaatcacctcttaaaatgtaaatacggagcgtgaattgcaatataatcacatttatacaaacaataaaatcaaataaaaacaacgatataaaataaaataaatccattttatattatataaaaaccactattttttcgctctccaccatcaactcagccattctttctcgccgctccgccatatagttccctcactggcacatatcctgcgaggtctttatgcaacaagaagcattaggaatggtagaaaccaaaggcttaaccgcagccatagaggccgctgacgcaatggttaagtcggccaacgttttattagttggctatgaaaggatcggttcaggcctggtgaccgtcatcgtgcgtggcgacgtgggggcagttaaagccgccaccgacgccggtgccgccgcagcccgccacgtgggcgaagtgaaagccgtacacgtcattccccgcccccataccgatgttgaaaaaatcttaccgaaggggaatagccaatgagcagcaatgagctggttgaacagatcatggcgcaagtcatagcccgtgtggcgacgccagagcagcaggcgcttcccgataccccccatcccacaggagagacggctatggcagagaaaagctgcagcttaacggaatttgtcgggaccgccattggcgacaccctcgggctggtcatcgccaacgtggatgccgcgttgctggaggcgatgaagctcgaaaaacgctatcgctctatcggcatcctcggcgcccgcaccggcgccgggccgcacatcatggccgccgatgaagcggtcaaagccaccaacaccgaagtggtcagcattgagcttcctcgcgacaccaaaggcggcgccggccatggctcgctgattgtgctgggcgggaatgatgtttccgacgtcaaacgcgggattgaggtcgcgctgaaagagctggaccgtaccttcggcgatgtctacggcaacgaagcgggtcatattgagctgcagtataccgcgcgcgccagttatgccctggaaaaagcgttcggcgccccactgggccgcgcctgcggcattatcgtcggcgccccggcgtccgttggcgtgctgatggccgataccgcgctgaaatcagccaacgtcgaggtggtggcttacagctcaccggcccacggcaccagtttcagcaacgaagccattctggtgatttccggcgactctggcgcggtgcgccaggcggtgatctccgcccgggaaatcggcaaaaccgtactggcgacgctgggcgccgaaccgaaaaacgatcgcccctcctacatttaatacccgcgaggctgattcatgagatcgaaaagatttgaagcactggcgaaacgccctgtgaatcaggatggtttcgttaaggagtggattgaagagggctttatcgcgatggaaagccctaacgatcccaaaccttctatccgcatcgtcaacggcgcggtgaccgaactcgacgataaaccggttgagcagttcgacctgattgaccactttatcgcgcgctacggcattaatctcgcccgggccgaagaagtgatggccatggattcggttaagctcgccaacatgctctgcgacccgaacgttaaacgcagcgacatcgtgccgctcactaccgcgatgaccccggcgaaaatcgtggaagtggtgtcgcatatgaacgtggtcgagatgatgatggcgatgcaaaaaatgcgcgcccgccgcacgccgtcccagcaggcgcatgtcactaatatcaaagataatccggtacagattgccgccgacgccgctgaaggcgcatggcgcggctttgacgagcaggagaccaccgtcgccgtggcgcgctacgcgccgttcaacgccatcgccctgctggtcggttcacaggttggccgccccggcgtcctcacccagtgttcgctggaagaagccaccgagctgaaactgggcatgctgggccacacctgctatgccgaaaccatttcggtatacggtacggaaccggtgtttaccgatggcgatgacaccccgtggtcgaaaggcttcctcgcctcctcctacgcctcgcgcggcctgaaaatgcgctttacctccggttccggctcggaggtgcagatgggctatgccgaaggcaaatcgatgctttatctcgaagcgcgctgcatctacatcaccaaagccgccggggtgcaaggcctgcagaatggctccgtcagctgtatcggcgtgccgtccgccgtgccgtccgggatccgcgccgtactggcggaaaacctgatctgctcagcgctggatctggagtgcgcctccagcaacgatcaaacctttacccactcggatatgcggcgtaccgcgcgtctgctgatgcagttcctgccaggtaccgactttatctcctccggttactcggcggtgccgaactacgacaacatgttcgccggttccaacgaagatgccgaagacttcgatgactacaacgtgatccagcgcgacctgaaggtcgatggcggcctgcggccggtgcgtgaagaggacgtgatcgccattcgcaacaaagccgcccgcgcgctgcaggcggtatttgccggcatgggtttgccgcctattacggatgaagaagtagaagccgccacctacgcccacggttcaaaagatatgcctgagcgcaatatcgtcgaggacatcaagtttgctcaggagatcatcaacaagaaccgcaacggcctggaggtggtgaaagccctggcgaaaggcggcttccccgatgtcgcccaggacatgctcaatattcagaaagccaagctcaccggcgactacctgcatacctccgccatcattgttggcgagggccaggtgctctcggccgtgaatgacgtgaacgattatgccggtccggcaacaggctaccgcctgcaaggcgagcgctgggaagagattaaaaatatcccgggcgcgctcgatcccaatgaacttggctaaggggtgaaaaatggaaattaacgaaacgctgctgcgccagattatcgaagaggtgctgtcggagatgaaatcaggcgcagataagccggtctcctttagcgcgcctgcggcttctgtcgcctctgccgcgccggtcgccgttgcgcctgtgtccggcgacagcttcctgacggaaatcggcgaagccaaacccggcacgcagcaggatgaagtcattattgccgtcgggccagcgtttggtctggcgcaaaccgccaatatcgtcggcattccgcataaaaatattctgcgcgaagtgatcgccggcattgaggaagaaggcatcaaagcccgggtgatccgctgctttaagtcttctgacgtcgccttcgtggcagtggaaggcaaccgcctgagcggctccggcatctcgatcggtattcagtcgaaaggcaccaccgtcatccaccagcgcggcctgccgccgctttccaatctggaactcttcccgcaggcgccgctgctgacgctggaaacctaccgtcagattggcaaaaacgccgcgcgctacgccaaacgcgagtcgccgcagccggtgccgacgcttaacgatcagatggctcgtcccaaataccaggcgaagtcggccattttgcacattaaagagaccaaatacgtggtgacgggcaaaaacccgcaggaactgcgcgtggcgctttaacaaaggatatcccgatgaataccgacgcaattgaatccatggtacgcgacgtgctgagccggatgaacagcctacaggacgggataacgcccgcgccagccgcgccgacaaacgacaccgttcgccagccaaaagttagcgactacccgttagcgacccgccatccggagtgggtcaaaaccgctaccaataaaacgctcgatgacctgacgctggagaacgtattaagcgatcgcgttacggcgcaggacatgcgcatcactccggaaacgctgcgtatgcaggcggcgatcgcccaggatgccggacgcgatcggctggcgatgaactttgagcgggccgcagagctcaccgcggttcccgacgaccgaatccttgagatctacaacgccctgcgcccataccgttccacccaggcggagctactggcgatcgctgatgacctcgagcatcgctaccaggcacgactctgtgccgcctttgttcgggaagcggccgggctgtacatcgagcgtaagaagctgaaaggcgacgattaacagggggtaagcatgcgctatatcgctggcattgatattggcaactcctcgacagaagtcgccctggcgacggtcgatgacgcaggtgtgctgaacattcgccacagcgcgttggctgaaaccacgggtataaaaggcacattacgaaatgtgttcggtatccaggaggcgctaacgcaggcggcaaaagcggccggcattcagctcagcgatatttcgcttattcgcattaacgaagccacgccggtcattggcgatgtggcgatggaaaccatcacggaaaccatcatcaccgagtccaccatgatcggccataacccgaagacacccggcggcgtcggactgggggtcggcatcaccatcacaccagaggcgctgctgtcctgctccgcggacactccctatattctggtggtctcctcggcctttgactttgccgatgtcgccgcgatggtcaatgcggcaacggcagcgggctatcagataaccggcattattttgcagcaggatgacggcgtgctggtcaataaccggctacagcaaccgctgccggtgatcgacgaagttcagcatatcgaccggattccacttggcatgctggcggccgtcgaggtcgctttacccggtaagatcatcgaaacgctctccaacccctacggtattgcgaccgttttcgatctcaacgccgaggagaccaaaaatatcgtgccaatggcgcgggcgctgattggcaaccgctcggccgtggtggtgaaaaccccctccggcgacgtcaaggcccgcgctattccggcaggtaatctgctgctcatcgctcaggggcgcagcgtacaggttgatgtggccgccggggcggaagccatcatgaaagcggttgacggctgcggcaaactggacaacgtcgcgggagaagcgggcaccaatatcggcggcatgcttgagcacgtgcgccagaccatggcggagcttaccaataagccagctcaggagatccgcattcaggatctgctggccgttgatacggcggtgccagtcagcgtgaccggcggtcttgcgggggagttctcgctggagcaggcggtgggtatcgcctcgatggtcaagtcggatcgcctgcagatggccctcatcgcccgtgaaattgagcacaaactgcagattgcggttcaggtgggcggcgccgaagcggaggcggccattcttggggcgctcaccactcccggcaccacgcgcccgctggcgatcctcgatctgggcgccgggtcgaccgacgcctccattatcaatgcgcagggagagatcagcgccactcacctggccggcgccggcgatatggtcacgatgatcatcgcccgcgagctggggcttgaggaccgctacctggcggaagagatcaaaaaatatccgctggcaaaagtcgaaagcctgtttcatctgcgtcatgaagacggcagcgtccagttttttccgtcggccttaccaccggcggtatttgcccgcgtctgcgtggtgaaaccggatgaactggttcccctgcccggcgatctgccgctggagaaagtgcgcgccattcgccgtagcgccaaatcacgcgtctttgtcactaacgccctgcgggcgttacgccaggtgagccctaccggcaacattcgcgacatcccgttcgtggtgctggtgggcggctcgtccctcgatttcgagatcccccagctggtcaccgacgcgctggcgcactaccggctggttgccgggcgcggcaacatccgcggctgtgaaggcccacgcaatgcggtcgccagcggattactcctttcctggcaaaaaggaggcacacatggagagtagcgtagtcgcccccgccatcgtcattgccgtcactgacgaatgcagcgaacagtggcgcgatgtcctgctgggcattgaagaggaaggcattccttttgttctgcagccgcagaccggcggcgatcttatccatcacgcctggcaggcggcgcagcgttcgccgctgcaggtaggcatcgcctgcgaccgggaacggctcatcgtgcactacaaaaatttacccgcatcaactccgctgttttcgctgatgtatcaccagaacaggctggcccggcgaaacactggcaacaatgcggctcgtctcgtcaaagggatcccatttcgggatcgccatgcttaatccacaggagaacgcagtatgaataacgcactaggactggttgaaacgaaaggcctggttggcgccattgaagccgctgatgcaatggtgaaatccgccaacgtgcagttgattggttacgaaaaaattggctccgggctgattaccgtgatggtccgcggagacgtcggcgcggtcaaagccgccgttgacgccggcagcgcggcggccagcgtggtcggcgaggtcaagtccagccatgtgatcccgcgcccgcatagcgatgttgaggccattctgccgaaatccgtctgaccctcaaaaaaggagcaccgcgtgaagcaatcactgggattacttgaggtcagcggtctggccctggccatcacctgcgccgacgctatggcgaaagcggccgccatcacgctgctcgccctggaaaagaccaacggttccggctggatggtggtgaagatcgccggtgatgtggcctctgtccaggcggcggtgatgaccggggccgaactcgccgaacggcagcaggggctggtagcgcagaaggttatcgccaggcccggggaaggcctgctgccggcccgcgtccaggcgccttcaccagcgcctgacgtcgccgtgacggaggagaacacggccctcacagacgccccctcccactctacggagcgggtgacctgcaacctgtgcctggacccacactgcccacgacaaaaaggcgatccccgctcgcagtgcctgcacgccggtaaacgaggtgacgcgtaatggataaacaacagctggcttcgacagtcaacaaagtgctggatgagatgcgccagcgtcccattccaatcggtatctccagtcgccatatccatttagcggcggctgactatgccaggctttttcccgcgcagcccatccagccgaaaaaagcgctgctgcagccgggacaatatgctgcagagcagacggtgaccctggttggccccaaagggcgattaaacaacgtgcgcctgctcggccctttgcgccagaccagccaggtggaaatctcacgcaccgacgcccggatcctcggtatcgccgcgccgctgcgcatgtccggcaatctgcagggcacgccggggatccgcctgataagcccctttgccgaactggagctgagcggcgggacgattgttgcccagcgacatattcatatgtcgccacttgatgcgttgatcctgcgcgtctcccatggcgatagcgtcgcggtggcgatcgaaggcagcgacaggcggcttatcttcgacaacgtagcggtccgcgttgccccggatatgcgtcttgaaatgcacatcgatactgacgaggccaatgcggcaggcgctgacgctgcgcaagcctgggcaacgctggtgacgaagccatgaaccacgcgatgctgcagcgtatcgtcgaagaggtcgccgcccgtctgcgccatcgcgccctcagcacggccacgctcagcgtggcccagctcggcgaagcggatatccgcagcctgctgtgccagcacgcttcgctgcgcatcgtgcaggtggatttaccgctgctggagcagcttgccggccagcgtgcgctggcggcagccggttgcgcactgcatgaggcgatggcctggggcgttcgggtacagctaacgctgcttcccgccctgctccccgcgctggcggtaaaaaaactcgcccgcttgccgctgacgttcagcgatccgcttggccagcccgtcaggcttcacgccgcgtcggtgctcacctatgccgacgtagcccgtttcagtggcggctatctggtgctgcgccgccgtcccattatcaccgccctcgcccgcgaagcggccgtcgcgcggcatgttcaattgattaagcaggagtgaactatgcatctggcacgcgtgaccggcgccgtcgtctcgacgcaaaaatcgccctctctgaacggcaaaaaactgctgctggtgcgccgggtaagcgcggacgacgatcgtccgattctccccacgagcggcgatgaagtggcggtagattcggttggcgctggcgtcggcgagctggtgctgctctgcagcggctcgagcgcacgccacgttttcagcggcccgaatgaggccatcgatcttgccgtcgtgggcattgttgactcactttcacgctaagggggcgcctgtggctatctatacccgaaccggcgatgccggcagtacatcactctttaccggccagcgggtcagcaagacgcatccgcgcgtcgaagcctacggcaccctggatgaactgaacgccatgctgagcctgtgcgtctgcgccgtcgctgaagaggaacagcgcaccctgctcgaagccctgcagcagcacattttttggttcagcgcggagctcgccagcgacagcgaacagccatcaccgggtaagcgctatatcagcagcgaagagattgccctgctggagcagaccatcgatcgcgagatggcccgcgtgccggcgctgcaccagtttgtattgcccggacgctgtgaagccgccagccgtctgcacctggcccgcaccgttgccagacgggcggagcgccggctggtcgagctggcggcagaggttactatccgtcagatactgctgcgttatctgaaccgcttatctgactgcctgtatgccctggcgcgcagcgaggatcatgccgctcaccagcgccgccttgtgacggagatcgcggcccgctatctggccgccagcgggtcgcctgcgcccgacgcgcccaaagcccaggccgggtcgctctcctttcacgagctgcatcagctcatccgtcaggccattgaacacgcccgccagctgcaggtgccggtggtgatcagcatcgttgacgcacacggcaccgaaaccgtgacctggcgaatgcccgatgcgctgctggtcagcagcgagctggcgccgaaaaaagcctggaccgccgtcgccatgaaaaccgccacccacgagctcgcgacgaccgtacagccaggcgctgcgctgtacggtctggagagccatctgcagggcaaagtcgtcacctttggcggcggatatccgctgtggcgcgatggccagctaatagccggcctcggcattagcggcggcagcgtcgagcaggatatggctattgcacaggctgccatggcggccattaacgtgagaactcatcaatgaatacagcagaactggaaacccttatccgcaccatcctcagtgaaaagctcgcgccgacgccccctgcccctcagcaagagcagggcattttctgcgatgtcggcagcgccatcgacgccgctcatcaggcttttctccgctatcagcagtgtccgctaaaaacccgcagcgccattatcagcgccctgcgggagacgctggcccccgagctggcgacgttggcggaagagagcgccacggaaaccggcatgggcaacaaagaagataaatatctgaaaaataaagccgctcttgaaaatacgccgggcatagaggatctcactaccagcgccctcaccggcgatggcgggatggtgctgtttgagtactcgccgttcggggttattggcgccgtggcgcccagcaccaacccaacggaaaccattatcaacaacagtatcagcatgctggcggcgggtaacagcgtctatttcagcccccatcccggcgcgaaaaaggtctcgttgaagcttatcgccaggatcgaagagatcgcctaccgctgcagcgggatccgtaacctggtggtgaccgttgccgagccgacctttgaagccacccagcaaatgatgtcccacccgctgattgccgttctggctatcaccggtggccctggcattgtggcgatgggcatgaaaagcggtaaaaaagtgatcggcgctggcgccggcaatccgccgtgcatcgttgatgaaaccgccgatctcgtcaaagccgccgaagatatcatcagcggcgccgccttcgattacaacctgccctgtatcgccgaaaaaagcctgatcgtcgtcgcctccgtcgctgaccgcctgatccagcagatgcaggattttgacgcgctgctgttgagccgacaggaggccgataccctgcgtgccgtctgcctgcccgacggcgcggcgaataaaaaactggtcggtaaaagcccggctgcgctgctggcggcggcgggtctcgccgttccgcctcgcccccctcgcctgctgatagccgaggtggaggcgaacgacccctgggtgacctgcgagcagctgatgccggtgctgccgatcgtcagggtcgccgactttgacagcgccctggcgctggccctgcgcgttgaggagggtctgcaccacaccgccattatgcactcgcagaatgtctcgcggctcaatctggcggcacgcaccctgcagacctccatttttgtcaaaaatggcccgtcttacgcgggaatcggcgtcggcggcgaagggtttaccaccttcaccatcgccacgccaaccggagaaggcaccacctccgcgcggacgttcgcccgcctgcggcgctgcgtgttgaccaacggtttttccattcgctaaccgggggcgccatgcataccttttctctgcaaacgcgcctctacagcggcccgggcagcctggccgcgctgcagcgctttagccatcagcacatctggatcgtctgcgacggcttcctggcgcgctcgccgctgcttgaccgactgcgcgccgcgctgcccgccagcaaccgcgtcagcgtgttcagcgatattacaccggatccgaccattcacaccgtggcgaaagggatagcgcagatgcagaccctgcgtccgcaggtggtgatcggcttcggcggcggctcggcgatggatgccgccaaggctatcgtctggttcagccagcagggcggtctgcctgttgacacctgcgtggcgatccccaccaccagcggtaccggttcggaagtgaccagcgcctgcgtcatcagcgacccggaaaaagggatcaagtacccgctgttccatgaggcgctctgtcccgacatggcgatcatcgacccgacgctggtggttagcgtaccgcccaccatcacagcccataccgggctggacgcgctgacccacgccctggaggcatgggtctcgccgcaggccaccgattttaccgatgcgctggcggaaaaggccgccaggctggtgtttcgcgccctgcccgttgcgattcgtcagggcgactgcattgcgacccgcagcaaaatgcacaatgcatcaaccctcgccggtatggcctttagccaggctggccttgggctcaatcatgcgatcgcccatcagcttggcggccagtttcacctcccccatggcctggccaatgcgctgctgctgaccgcggtgatccgcttcaatgccggcgagccgcgagcggctaagcgctatgcgcgcctggccagggcctgccgcttctgcccgcccgcagctggcgaacaggaggctttccaggcgctgcttaccgcggtggaaacgctgaaacagcagtgcgccattccccccctcaagggcgcgctgcaggaaaagtatccccttttcttatcgcgaattcccgccatggtgccggccgcgctggccgacgccaccctgcgcaccaacccgcgtccggtcgatggcgcggccatcgcgcaactgctggagaacctgcaatgagtgaagcgatagtgccactatcaagcattgatgcagcggagatccgcgaacgcgttcgggccgctggcgtcgtaggagccggtggcgcaggctttccgacccacatcaaactgcaggcccgggtggacaccgtgctggtgaacgccgccgaatgcgaaccgatgctgaaggttgaccaacagctgatggctcagcaggctgaccgactgattcgcggcctgggttacgcgatgaccgccactggcgcccgggaagggatcattgccctgaaggcgaaatatgctccggcgattgcggcattaaccccacgactcccggaatgggcccggctgcatattctgcctgacgtctatccggccggggatgaggtgctcactatctggctggcgacgggacgccgcataccacctgccgcgctgccggtcagcgtcggcgtggtggtcaataacgtgcagaccgtgctcaatatcgccagagccgtggaacagggctatccggtgactcgccggacgttgaccgtcaatggcgccgtcgcccgtccgctgacgctggccgtaccactgggtatatcgctgcgcgaggtgctggatctggccggcggcgcgacggttgacgatccggggtttatcaacggcggtccgatgatgggctcgcttattacctccctcgagacaccggtcaccaaaaccaccggcggcctgctggtgctcccgggcaaccatccattgatccagcgacggcggcaggatgaacgaacgctgctcgccatcgcccgcaccgtctgtgaacagtgccgtttatgcacagatttatgcccccggcacctgatcggccatgagctttcccctcatctgctggtgcgggcggtgaactatcgccaggcggccaccccgtcgctgctgctcagcgccctgacctgttcggagtgcaacgtttgcgagagcgtcgcctgcccggtgggtatttcccccatgcgcatcaaccgtctgctgaaacgtgagctgagggcgaaaaacctgcgctacgacggaccgctgcgtccggcggacgagatggcgaagcaccgcctggtgccggtcaagcggctcatcagcaaactgggacttgatccctggtatcaggaagcgccgctgacggcggtggaaccggaggtggcctgcgtcaccctgcccctgcgccagcatatcggcatcagcgccgtgccctgcgtcgcgccgggagagcgggtaacgcgcggccaggtgctggcggatatccccgccgacgccctcggcgcgccggtgcacgccagtattgacggcctggtctccgccatcacggagcaggccattacgcttgtaagaggttaatcatgacccaggctatcggaattttagaactgaccagcatcgccagggggatggagctgggtgacgtcatgctgaaaagcgcgaacgtacagctcctgctctgcagaaccctttgccccgggaaattcctgctgatgctcggcggcgacgtcggcgccgtgcagcaggcaatcgccgccggcaccgcgcgcgccggggagatgctggtggacagcctggtgctggccaacattcaccccagcgtactaccggcgatcagcggtctcaacgtggtcgggcagcggcaggcggcggggatcgtcgaaacctggagcgtggcggcgtgcatcagcgccgccgaccgcgcggtgaaagcggccaacgtcaccctggtgcgggtccatatggcgtttggtatcggcggcaaatgctacatggtggtggcgggtgatatcgccgatgtcgacaacgccgtcacggtggccagcgacagcgcaggcgagaaaggattactggttcaccgggcagtgatcccgcgaccgcacgatgcgctgtggcaacagctgatggagggataatggaaccgcaaacccctaccgaacgcatgatccaggagtatgtcccgggcaaacaggttactctggcgcatctcattgccaatcctggcaaagatctgttcaaaaagctgggtctgccggacgcagtctccgccatcggcattcttaccattacccccagtgaagcatcgattatcgcctgcgacatcgctaccaagtccggcgcggtggagatcggttttctcgatcgcttcaccggcgcggtggtgttgaccggcgatgtctccgccgtggagtacgcgctcaggcaggtcacccgcaccctcggtgagctgatgcgcttcaccgcttgcccaattacccggacctaagcccatgaaacgcctgatgctaatcggacccagccagtgcggcaaaacctcgctgacccaggtattgcgtggcgaaaccctgcgctatcagaaaacccaggccatcgtctggacgccggccgccatcgatacccccggggaatatctggaaaaccgctgcctgtacagtgcactgctcaccagcgtctgcgaggccgatgtcatcgcgctggtactaaatgccgatgcgccctggtcacctttttctccggggtttaccgccccgatgaaccgcccggtcatcggggtgatcactaaagccgatttggccgccccgccccgtctgcaacaggtccggacatggctcgagacggcgggcgccggacatatctttatcaccagcgcgttaaccggcgacgggcttgatgacctgttcgcctgcctgaatgcagaggaatatcaatgacctataaaatcatggcgattaacgccggcagctcctccctgaagtttcagctgcttaacatgccgcagggggcgttgctctgtcaggggttgatcgaacgtatcggcctgcccgaggcccgcttcacgctgaaaacgtcggcacagaaatggcaggagacgctgcccatcgccgatcaccatgaggcagtgaccctcctgctggaggcgctgaccggccgcgggatcctgagcagcctgcaggagatcgacggcgttggccaccgcgtcgcccacggcggcgaacgcttcaaagacgccgcgctggtctgcgacgataccctgcgggagatcgagcgcctggcggagctggcgccgttgcataacccggtcaatgcgctgggcatacgtctctttcgccagctgttacccgcggtaccggcggtggcggtttttgataccgcctttcaccagaccctggcgccggaggcctggctctatcccctcccctggcgctattacgccgagctgggcattcgccgctacggttttcacggtaccagccatcactatgtcagcagcgcgctggcggaaaagctgggcgtaccgctgagcgccctgcgggtagtaagctgccatctgggcaatggctgtagcgtctgcgccatcaaaggcgggcaatcggtgaatacctcaatgggctttaccccgcagtccggggtgatgatgggcacccgcagcggcgatctcgacccgtcgattcttccctggctggtggagaaagaagggaaatccgcccagcagctcagccagttgctgaataatgaatccgggctgcttggcgtctccggcgtgtcctctgattaccgcgacgtcgaacaggcagctgacgccggcaacgaacgggcggctctggcgctgtcgctgtttgccgaacgcattcgcgcgactatcggcagctatatcatgcagatgggaggtctggacgcgctgatctttaccggcggcataggcgagaattccgcccgtgcgcgggcggcgatctgccgcaatttgcattttctcggcctcgcgctggacgacgagaaaaaccagcggagcgcgacctttattcaggcggataatgcgctggtcaaagtggcggtgatcaataccaatgaagagctaatgattgcccgcgacgtcatgcgtcttgcattgccgcaggcgcgcgagctggcggtgtcggcataaacgacgcgcctcctcttgcggagaatcatggtaaccggcgggtcgccatgccactatgcgccctggcgaaggtaagcggaaaggtgaaaacgtggctgttgcacaatgtcccgcctcgtgcggagaacttatccagggctggatcctcggcagcgaaaagctggtctcctgtccggtggactggtacagcaccgtcgaggtcgagaccggggtaccgcgaaaagacgagcggccgctgtcgcgggcgatggtcgaccagctgctggcccactggggctaccccccagcgctgagccagcagatccgcatcaccctgcactcaacgatcccggtggccaaagggatggccagcagcaccgccgatatcgctgccaccgccgtcgccaccgcccatcatctgggccatctactggatgagccgacgctggcgcgcctgtgcgtcgcgctggagcctaccgacagcaccctgtttcgccagctgacgctgttcgaccataataccgccgccacgcaaatcgcctgtccccctccgccggcgctcgacctgttagtgctggagagcccgctgacgctgcgcaccaccgactatcaccagctgccgcgcgagccgggcctgttggcaaacgcctcccggctgcagctggcgtgggagaaagtacagcaggcctgccactgcggcaacccgcagctgctgggcgaagcagcgaccatcagcgccattgccagccagcagctgttgcctaagccggggtttgacgcgctgctggacctggtggaaagcgcagggctctatggtctcaacgtggcgcacagcggcagcgtcgtcggcctgctactggaccgccgtcggcatgacgtcgaatttctgcaatggcggctggcagacagcgacatcgccgcccactggccgcagcagcatctgctggcgatggtgcccgggggcgtcatcctgcagtaggcctcaggccagcacccggcgcaacgccgccagcagctggtcgttttcctcggcgctgcggatcgccacccggaaatagcggctatccagccccgggtagttggcgcagctgcggatcagcacatgctggcgcagcagggcatattgcaggtcaaaatcggctctgtcgcagcgcaagaacaggtagttagcacgcccgggccacacggtcagcccggccatctcctgcagctgcgcatagaaacgcgctccctcctcctgcagccactgccaggtggcccgctgatacgcccgatcctggagaataatttccccggccagggcggcataggcgttgatggaccacggcatttgtcgcgcgcgcagtcgggccaccgcctgggcatcagcgttcagcaggtagccgagacgcagccccggaatggcataaaatttggtcagcgatcgcagaacccagacgtgcggatgctgcgccagcagaggaataaaccccggctggtcggggataaagtcgaggaaggcctcatcgaggatcaggctgatgttcagcgcccggcagcgctgcgcaatggcttccagcaggccccgctccggcagcaggccggtggggttgttcggggtgcagagaaacaggcagtccagcgccggagtcagggcatcgaggatcgcgtcggtcagctgccagccatcgcgctcccgcagggcatactccaccacctcgcagtccaccgtctgcagcgcccgccggtactccgcgaaaccgggaatgacgatcatcgcccgccgcggcttaaggccgtggacgagggtgaagatcgattcagtttcgccgttgccggcgaggatctgcgccgccggcagctgatggtgggcagccagcgcctgatgcagctgttgatactcgacgtcaggatagcgttcggcgcagcctgggttgtcaacgatcgcctgcctgagcgaggcgggcatccccagcggattaatgttggcgctaaaatccagcagctcgccgggcgcaatgcccagcagggcggcggcctcgcgggtgttaccgccatgggcgcttttcagtaaggccatgtccctttcctgtgtggttatccgcggcgggccagcgtcgcgccgtcggcaaagtaggctttaatcccggcgaggatcgactcggccacctcctgctggaatttggccgttttcagtttccgctcttcttccacgttactgataaacgccgtctccaccagaatggaggggatgtcaggcgccttcagcaccgcaaagcccgcctgttctacccggttcttgtgcaggttattgatattgcccattttctccagcaccgccttgccaaatttgaggctgtcagcgatggtgagagactgcaccatatcgaacatggtgtggtcgacatagcggtcgccgctcttgctgaccccaccgatcagatccgaggcgttctgcgtctgggcgagatattttgccgcggtactggtggcccccttggtggagagggcaaacaccgaagagccgctgggctggcggctggtaaaggcatcggcgtgaatcgacacgaacaggtcggcgcgctgcttctgcgccttggcgacacgcactttcaacgggatgaacacgtcttcgttgcgggtcatataggccttcatattgccttctttgtcgatcagcgcccgcaggcgacgggcaatctgcagcaccacgtctttttcgcgggtgcgatactttcccacggcgccggagtcttcgccgccgtgtccgggatcgagcatgatgacaatcggccggtcgcgcccggctttgcccggctgcggcccgctttgcgccggcggcacctgccgctccagatcgcctttgttgtaatcctcgagcagcgccagcagcggatcctgaacatcggtagcgttggcggggtagagatccatcaccagacgctctttaaagccggccaccggcgcgagggcaaacagctgcggcttaacgttctgcttgagttcgaagaccatgcgcacggtttgcggatcaaactggcccacccgggcggacttaataaagggatcgtcagcgcggatctgcccccccatgcccttcagtaccgagttcaggttaaccccctccagatcgaccactacccgttccggattactgagggcaaactgccggtatttcagcacatgattcgattccaccgtgacgcgggtgtaggtcgatgctggccagacgcgaacagcgaccacccgcgcggcggcggccagcccgacagggctcacgctcattaaccacatggcgcccgccccctgcaataaacggcgacggcttaatccagagttgtttcccgacatgccactcccaagcaataaaaacgcatttatacccaaaacaaacagattgaccagaaactttaacgaaaggcatataacctgtcatctataaaagggtaaacattcattgacaccctgcgccgggtcacatgtttttcgcggcttagcctcaaattggggcttgcgtttaacggcaaaacagaataaaaatacaataattacgaataatcatgcattgagggtttgtcatggtgaaggaacgtcgcactgaactggtagaaggattccgccattctgttccctatattaatgcccatcggggaaaaacgtttgtcatcatgctgggcggcgaagccattgagcatgaaaatttctcaaatattgtcaatgacataggattattgcatagcctgggcattcgcctggtggtggtctatggcgcccgcccgcagattgacgctaacctcgccgagcaccatcacgagccggtctatcacaagcagacgcgagtgactgacgccaaaacgctggagctggttaagcaggcggcggggatgctgcagctggagatcaccgcccgtctgtcgatgagcctcaacaacaccccgctgcagggggcccatatcaacgttgtcagcggcaactttatcattgcccagccgctgggcgtcgatgacggcgtcgattattgccacagcggacgcattcgccgcattgacgaagaggcgattcatcgtcagctcgacagcggcgccattgtcctgatggggccggtcgcggtgtcggtcaccggcgagagctttaacctgacttcggaagagatcgctacccagctggccatcaagctgaaggcggagaaaatgatcggcttctgttcgtcgcaaggggtttacaaccaggccggggaaattgtctccgaactgttccctaatgaggcgcaagcccgcgtcgaagagctggaagcagacgaagactataactccggcaccgtgcgcttcctgcgcggggcggtgaaggcctgccgcagcggcgtacggcgctgccacctgatcagctatcaggaaaatggcgcgctgctgcaggagctgttttcacgcgacggcatcggcacccagatcgtcatggagagcgcggagcagatccgtcgggcgaccatcaatgatatcggcggtattcttgagctgataagcccgctcgagcagcagggcattctggtacgccgttcccgcgaacagctggagatggagatcgacaaattcaccattattcagcgcgataacaccaccatcgcctgcgccgccctctatcctttcccggaagagaagatcggcgaaatggcctgcgtggcggtgcatccggattaccggagctcgtcgcggggagaggtgctgctggagcgtattgccgctcaggccaggcagatgggactgagcaaactgttcgtgttaaccacccgcagcatccactggttccaggagcgcggcttcacgccggtggatatcgacctgctgccggagagtaaaaagcagatgtataactatcagcgccggtcgaaggtgctgatggccgacctcgcttaagcccttctcctctctatctaacggcccgggatagcgcgacgcttatcgctttatccccggccggtctcccgcccctcttcccgccagcctggcgtacgcacgcgggcgaaattcctggtttccgcgcaggccatttctttctcgctggctcaccgatatgctattggctgtcgacaggacgtcgactggcgccgcggccgccacccgcccagcaaggatcgcttaaagaatggaaaccaaaccgaactggctggtcagacatattaatctcattaccaccgcggtcgccctctatccgtggttgctgatgatactgctcctctgggataaccagcgccatcatcagcatggctatgccgcgctcggcgccgccatcgcgatattatttctgctggccctgacgtccggcatgaatcttctcatctcctcgctggtgattttttgtgcccgctgttccaccccaccgctggccggcggcgcagcagtccgctttttcgccatgaactcgatctcggcgctctggcttatccctctgttcttcagttactgatttttccgccagcccgggcaacggctgcagcattttccatcgcccggacccggcgtctcagggggcttcgcgcccggcgaaaatctccgccaggccgctgcgccgttcggtgcgcgtcacaatggcctgggagagcacctgctcgtcggcatagagcgacaaccgccgtttcgcgcgggtgatcgccgtgtagaccagttcgcgggtcaccagcgggacgctgcgcgccggcaggatcagcgccgcgtgttcgaactccgagccctgcgatttatgcacggtcatcgcccaggcggtatcatgctccggcagacggctcggctgcaccgacttgatggcgccgtcgggcatcaggaaccacacccgcagctcgccgttgcgctccagggcgatgccgatatcgccgttaaacagccccagcgcgctgtcgttgcgcgatatcatgatcggtcggccatcataccagcgagagtggcgcggcagggcgatcgcccgctggcggttgagccgctgctccagccgctcattgacgccgctcacgccgtacggcccctcgcgcagcgcgcacagcagctggaattcgctgaaagcggccagcatggcctgcggttcggcccgctcgcggcgcagctgcaggtagcgctcatagccctgctgagccgcgccgagcatggcttcgtactcttcggtcgtgctgaggggatgaagcgcgatatcgtcaaacggctggcgcagcgtggccttcacctccgcgcgcgcgccagcgttcaccgcccgcgccaggctcccgatgccggagtgactgccgaagcgatagctcttttgcagcaggcacaaactgtctctcagcgcgcccgcgatagccccctcgcccgccggcaccggcgaaccggtcagccgggtcagctcctgcgcccgcgcggcggtatagcccgaactcgcccaggcgcagatatcccccagcaccgcccccgcttctacggaggccagctggtcgcgatcgccgaggaaaatcacccgcccgtgggccggcagcgcgtcgataagccgcgacatcatcggcaggtcgatcatcgaggcttcatccaccaccagcacgtccagatgcagcgggttgccggcgtgatagcgcatccgctggctgcctggctgggcgcccagcagacgatgcagcgtgctggcctcggtgggaatcaacgctttctgcgcgtcggtcagcggcaattttctcagcgccgcgcccagcgattcggtcagacgcgccgccgctttcccggttggcgccgccaggcgaatacgacagcgcgggctgtcttcgatctggatcagcgccgccagaagcttcgccacggtggtggtcttcccggtcccgggaccgccggagatcactgagatgcggcgggtcagcgccaccgccgcggccactttttgccagtcggtttcgccggtggcagggaacagggcattcagggttgacgccagccgggcctcatccatctccagcacccggttggcttcattgaagaagcgggcgacggtcagctcgttgcgccacatccggttgagatagagccggtcgccgcacaaaatcatcggcgccggagcatcgccgcagctcaccgccgacgaagcgagcagcagtgcgggccagtcctccggcgcgccggcttcggccagcagccgatcgcggatctccccggctttaccgctcagcgcctcgtcgccgctcaaccgcgagagcggcagacagacgtgcccctcgccggcatcccggctcagcaaggccgccgccagcttgaccgccggcgggtcgttttgcgccaccatcagggcaaactggacgtccagcggccgcagcagacgctgctccaccgccgccagcagtagttgttcgaaagtcatgaggcctcctcctgagtttctccggcaaaaagctgatccagaccgtcaatcagcggtcgcaccggccgggtggtgaagatcccctgccccccctcctgcccgtccatgccgcgcaggaaaagataaatcacgccgccgaagtggcggtcatagtcataatcggccagccggtggcgcagatagcggtgcagcgccaggctatacagctgatactgtagatcgtagcggtgggcacgcatcgcctgctccatcgccggccgggtgtaggcctcgcgatcttcccccagccagttggatttgtaatccagcaggtaataacggccttcgtgacggaagaccagatcgataaagcccttcagcatgccgcgcacctggcggaaatccagcggcggcgtgtcggcagagaggggatcgtactggcggataagcgcgtcaaggcgctccgccgtcagcagctgggcgatgggcaggtaaaatgccatctccacctgtttatcccgcgccgcaagctgattgagcgcgatatccggccccggcaggcgggtcttcagcacgccccccagccagtcggtcagcaccggcgcccactgcgcgtcaaacccgctcagctgcagcttctccgccatccacccttccggcaccggctgggtgaagtccagctcctcaaacaggctgtgcaggaaggtccccggcgcggcgccgcgcgggaactggtgcggagtcagctgcggctcttccacgacttcgccgacgccggcggcatcaacatccagacgcggcagcaaatcctgcccgccgctgaaaccatgctgctgcagtccggagtaactggtcacccgccagtcgtcggcgatgcggcgctgcagctcgcgcgccgacaatcgcgggatggtcgccgcgggcgcctgccacggggtgagatccagttcgcccggaatctgtaatgcaatatcgccatgacagaagtccgccagccgcgcagccagcccagcggcgtccatggcttcgcccgcctgcagcagccgccccagcgcgctgaggtggaaatcgctgttgccggatttccggctgctgagcggcgccacgccgaggctgcagtgccagaccgcgcgggtcagggccacgtacagcaggcgcagatcttccgccagtcgttccgcctccgccagctcgaggctggcctcatcctggcccaaatccagcaccgccgcgaacgtctcgcgatcgtggtaaaacgcctggtcctgtttacgaaaccgggcgataaacggcagccagaccagggggtattccagcccttttgacttgtgaatggtgacaatttgcaccaggtgcttatcgctttcgagacgcatctgctggctggcggcgttgctgtccggctcggcgatatgctgcgccagccagcgcaccagggcatgctcgctttccagctggctggccgcctcctgcagcagttcgctgatgtgcagaatgtcggttaagcgccgctcgccgccgcgggtcgccagcagattctcggcgatatgtcgggctgtcatcaacgcccgcagcatcggcatcactccgcgctgccgccaaatctggcggtattcgctgaactcttccaccagcgcgtcccacgcctgctcatcctggttcaggttttcaatatccagcgcggtcaggccaaacatcgacgtcgccagcgcgctgcgcagggtattttcccgctccggggccagcaccgcctgcaatagccagagcagctcctgggcctccagcgtctcaaaaacgctgtcgcggttggagaggtagaccgagggaatacccagcgtctgcagcgcttcacgcacctgcgccgcctccagccggttgcgcaccagcacggtaatatccgaagcctgtaccgggcgcgaggtttccccgcgccacagcagcgcgcgcccctgctgaccggcgctcagccagtcgcggatctgcgtggcgcagagctgcgccataaaggtctgataatcgccagacccgacagtgtcgccgggcatcagccagacgttcatcgccggtacgtccgccgcgtcaacggtaaagcgcagccccttgttcttcgccgccgccttcaccggcaggaacgggatctcgtggaacatgaaggggttatcgctgaggctgaacagccgattgacgctgcccaccatgcccggcgaggagcgccagttggtatcgagggtgtagtgcgcggcaacgtcgccgcgcgctttcatataggtaaagatatcggcgccgcgaaaggcgtagatggcctgcttcggatcgccgatcagcagcagagccgtctccggctgccggcgccagatgcggcgaaaaatccggtactgctgagggtcggtgtcctgaaattcatcgatcatcgccaccggaaaacgctggcgaatagcgctggccagcgtctcgccgctgtcgccgcgcagcgcctcgtcaagccggctgagcatatcgtcaaaccccagctcgccgcggcggcgcttttcgcgggcgaccgcatcgcggatctcgaccatcgctctcgccagcaccagatcggtgagcgtcagcgaggaggccagcaacgactctacggcgctaaacaggggatgcaccggcggttcgccaccggctttggtgcgctcgagcagaaacgactgggcaaatttctccagcgcgtcgggcagctggtagcttaacgtctcttcctgcgcccaggcgttcactttctccatccacttgccctggttgccgcgattaaacttccgccggtcaaggccggaattttccagcacgccttcgatctcgcccacctgctcgcgccactgctgcttgagcgagtcaatgcgggcgatgatctgctgatggcgttcggccagcgtctcgttaggggctggcggcgacttaagctgcggcgcttcgccctgcagccagcggtcaagggacttcagcagatcgcgcggccctttccagacgtcgtggatcaccgccgcgatatcgcgggtcaggggatagcagtggcggcgccagaaatcggcgcaggcctgataacgcaggcgggattcatcctcgatcagctgttgctcgaacagcatgcccgactcgaaggcgttaaggctcagcatccgttggcaaaagccgtggatggtgaataccgccgcctcgtccatctgccgttcagccagcagcagcgtcttcgcggcgtcgtctttatcggcgatctccgccaacaacgcgctgtagagcggattgtcggattcgccgcgcaggcaggcgatgcgcagttcgtggatgttgctgcggatacgaccgcgcagctcttcggtcgccgcctcggtaaaggtcaccaccagcagttcttcaacgctgatggcgcggggataggcggcctcaccgcccagccccaacagcagccgcagatacagcgcggcgatggtaaaggtttttccggttcccgcagaggcttctatcaggcgctcgccgatcaggggcaagcgcaggggatccaaagactcagcggtgtcggtcattcattctctcgcatcaggggtaaggattgctgcaatgcgctgacgttttcccacactttgccgcctttcggctgggcatagtccgctttgccattctggctaccggaaatctgggacaagatcgtcatgccctgcggatccaccaccgtctgatggaagaagtcggcaagtttttgcggcgtcagcagtttaatctgagccactactttatcacgtgaatcaaaacgcatattaccgcgatcgaaatctttgctcagtttcgaggcttcatcgcccagcgtctgcggcgcctgcagcatctggcttatcaccgcctgctggagctgggcaaactcttccggcttcatcgcccgcagcttcgcctccgcggtggggaagaaggcctggaaccgctgccagaggaaggccggttgcttatcgctactctgcagcaggaagcccatgccccactggcgccccacgttcatcgggaaggcaaagaccgcgtagccgagttgctcttcggtacgcagctggttgtagaaccacggctgaataatctgtcccagcagggtgctggcggcggtgctgctgaactcatcaacattgggcggcgcgaacaccgcggccagcgcggagtcggtgctgttgcccgctttgttgaagatcgccagctgctgccggttcaccaccacgtctttattgcggcaccattcgttgccgtcagcgcccagctgctgctggatctggcgggccagggtcg
